United States Patent Application Publication US 2006/0134663 A1 - sequence listing, part 17

SEQ ID NO: 27887 - DNA, 4031 bp, Homo Sapiens
gagaatcgtgagggtggccaagtccagtttggacctctgacccttgggcagcacctcccgacagccggctcgggacccaactctgcgagccaggtgaaaatgagttcttcagtaagaagaaaaggcaagccaggcaaaggaggtggaaaagggtcttctagaggaggaagaggaggcaggagtcacgccagtaaatctcatgggagtggtggcggtggcggtggtggtggtggtggaggtggcggcaacagaaaggcctccagtagaatatgggatgatggagatgacttttgtatcttcagtgaatcaaggcgcccttccagacctagcaacagtaacataagcaaaggagagtcacgcccaaaatggaaacccaaagccaaagtaccccttcagactctacatatgacttctgagaatcaagagaaagtgaaagctcttctccgagacctgcaagaacaagatgctgatgctggatctgaaagaggcctttctggggaggaggaagatgatgagcctgattgctgtaacgatgagcggtactggccagctggacaggaaccttccctcgttcccgacttggatcctttggaatatgctggcttagcctcagtggagccttatgttccagaatttacagtctccccatttgcagtgcaaaaactttccaggtatggtttcaatactgaacgctgtcaagcggtcctgaggatgtgtgatggagatgtgggagcatcactagagcatctccttacccagtgtttttcagagacatttggagagaggatgaagatctctgaggcagtcaaccagataagcttggatgagtgtatggaacagcgacaggaagaggcatttgctctcaagtccatctgtggagaaaaatttatagaaagaattcagaacagagtctggaccattgggttagaactggagtatctgacaagtagattccgcaaatccaagccaaaagaaagtaccaaaaatgtacaagagaattcacttgaaatctgtaaattttacctcaaaggaaattgtaaatttggatcaaaatgcagattcaaacatgaagtgcccccaaatcaaattgttggaagaatagaaagaagtgtagatgattctcatcttaatgctattgaagatgcatcttttttatatgaacttgaaattcgattttctaaagaccacaaatatccctaccaagctccgctcgtggcattttattccaccaatgagaacctacctctggcttgtcgtttacatatttctgagtttctttatgacaaggccttgacatttgcggaaacttcggaacctgtcgtatattctttgataacccttttagaggaagagtcggaaatagtcaagttactaacgaatacccaccacaagtatagtgatcctcctgtgaactttctgccagtaccctctaggaccagaataaataatcctgcctgtcataaaacagtgattccaaataattcttttgtttctaatcaaattccagaagttgaaaaagcatcagaatctgaggagtcagatgaggatgacggtcctgcacctgttatagtagagaatgaaagctatgtgaaccttaagaaaaagatttccaaaagatatgactggcaggcaaagtcagtacatgctgaaaatggtaaaatctgcaagcagttccgaatgaaacaggcttccagacagttccagtccattctgcaagagaggcaatcactccctgcttgggaagaaagagaaaccattcttaacttattgcgtaagcaccaggtggttgtcataagtggtatgactggatgtgggaaaaccacacaaattccgcagtttattctggatgattctctgagtggaccacctgagaaggtagccaacatcatctgtacccaaccccgacgaatctctgcaatctctgttgctgaacgcgttgctaaagaaagagcagagagggtgggtctgaccgtgggataccagattcggttagaaagtgtcaaggtttgtatgctctgcttatttcctggtaacagaaatttatggtttttaggtataaaaagttttgggggttaggggattcatgggcaatttgggatatatactttcaggttatttttaaattaatgattacctttggtaatcatttatttaaatatttagaaatatttagaaatattttggtataagaactcttatggccaggcgcggtggctcacacctgtaatcccagcactttgagaggccaaggcaggtggatcacctgaggtcgggagttcgagaccagcctgaccaacatggagaaaccccatctctactaaaaatacaaaaattagccgagtgtggtggcacacgcctgtaatcccagctactcgggagtctgaggcaggagaatcccttgaacctgggagacggaagttgcaatgagccgagattgcgccattgcactccagcctgggcaaaaagaggaaaattctgtctcaaaaaaaaaaaaaaaacaaaaaactcttatttggttgtactaaatttcctctgtaaagctttttattttttattggcagaagtcatctagtaaagactgttttgctcttgaacttgggacataatccatttaaccaaataaggagcagacagattgagaactgttttcattattcactgttttttaatgctttttatgaaaatcttaacattgtgatatgaagtagaaaggcttttattactgtccctggcaagaaactatgtttagtatggtttcctattaaatggaactgctggtgtttccaatattttttatcactatccattcaaaatggctttccagtaatgtttcctttttttgaaaattttattaatgatttatattgccctttcatgtgtaagtcctcagccaccagactgttatactgcaccacgggagtgctgctgagaaggctagaaggagatacagctctacaaggagtttcccatatcattgttgatgaagttcatgagaggacagaagaaaggtaaaacaaagactttcccagggaacacacactcacctgaattgaaggcatggcagaaaaaattgttttctagttccaattcagtttcatgcagctagtaatggtaatttgccacaaggaaggcctatgttagagaagagcaactgctttcttgatctccagggtctgtaacactaaaaaggacagcacatgctcatcacttattagatggagtcatcctgttaggttagaaggtatacttcacaccatcctgggcattatgctaagttgaataccgtacttagtagaaataacagatgtcatgcatgctgtggctgaatgtatcttcttccttgtttatttggccattcagtcctgacattgattcatgtatttattgagcctgcattaaatgccaagtgatatattagttgctggggatacagtgatgaacaagcatgtatggctccccctcatctcttacagtccagtagaaaaaacaaataatgaacaagtaaacaagcaaatgattgtaaattggaataagcactatgaaggaataaacggcatgctgtgtttggagggagagacccatagatgctcaaagatcatatctctgtaagatgacaatttaaattcaaaactgaagtatggccgggcgcaatggctcacacccataatccctgcactttgggaggccaaggtgggaggatcgcttgagctcaggagttggagccccacctgggcaacatagtgagaccatgtttccacgaaaagtaaaaaaaacaaaacaaaacaaaaaatagccagtagtcattctactggggatacagaaaaaaaaaaaaaattagccaggcgtgatgcctcacacctaaggtcccagctactcaggaggctgaggcaggagaatcaattgagcccccaggaggttgaggctgcagtgagctgtgatagcaccactgcactccaccctggtcaagaaagcaagaccctgtctcaaaagaaaagaaaacaaaagaaaagaaaagaaaaaaaaaaaaaaaa

SEQ ID NO: 27888 - DNA, 4315 bp, Homo Sapiens
ataccagaattaactctgctcagagttagatttgctggtcttaaagtacttttcctctttaagataaaagaagttcttctaaatcaggaatggattgaaatctaatgaaccgaaactttgggtaattgatcaccctagacccagggacacccaattcatcgtaatcatcatgaataatcaaaaagtggtagctgtgctactgcaagagtgcaagcaagtgctggatcagctcttgttggaagcgccagatgtgtcggaagaggacaagagcgaggaccagcgctgcagagctttactccccagcgagttaaggaccctgatccaggaggcaaaggaaatgaagtggcccttcgtgcctgaaaagtggcagtacaaacaagccgtgggcccagaggacaaaacaaacctgaaggatgtgattggcgccgggttgcagcagttactggcgtccctgagggcctccatcctcgctcgggactgtgcggctgcggcggctattgtgttcttggtggaccggttcctgtatgggctcgacgtctctggaaaacttctgcaggtcgccaaaggtctccacaagttgcagccagccacgccaattgccccgcaggtggttattcgccaagcccgaatctccgtgaactcaggaaaacttttaaaagcagagtatattctgagcagtctaataagcaacaatggagcaacgggtacctggctgtacagaaatgaaagtgacaaggtcctggtgcagtcggtctgtatacagatcagagggcagattctgcaaaagctggggatgtggtacgaagcagcagagttaatatgggcctccattgtaggatatttggcacttcctcagccggataaaaagggcctctccacgtcgctaggtatactggcagacatctttgtttccatgagcaagaacgattatgaaaagtttaaaaacaatccacaaattaatttgagcctgctgaaggagtttgaccaccatttgctgtccgctgcagaagcctgcaagctggcagctgccttcagtgcctatacgccgctcttcgtgctcacagctgtgaatatccgtggcacgtgtttattgtcctacagtagttcaaatgactgtcctccagaattgaaaaacttacatctgtgtgaagccaaagaggcctttgagattggcctcctcaccaagagagatgatgagcctgttactggaaaacaggagcttcacagctttgtcaaagctgctttcggtctcaccacagtgcacagaaggctccatggggagacagggacggtccatgcagcaagtcagctctgtaaggaagcaatggggaagctgtacaatttcagcacttcctccagaagtcaggacagagaagctctgtctcaagaagttatgtctgtgattgcccaggtgaaggaacatttacaagttcaaagcttctcaaatgtagatgacagatcttatgttcccgagagtttcgagtgcaggttggataaacttatcttgcatgggcaaggggatttccaaaaaatccttgacacctattcacagcaccatacttcggtgtgtgaagtatttgaaagtgattgtggaaacaacaaaaatgaacagaaagatgcaaaaacaggagtctgcatcactgctctaaaaacagaaataaaaaacatagatactgtgagtactactcaagaaaagccacattgtcaaagagacacaggaatatcttcctccctaatgggtaagaatgttcagagggaactcagaaggggaggaaggagaaactggacccattctgatgcatttcgagtctccttggatcaagatgtggagactgagactgagccatcggactacagcaatggtgagggagctgttttcaacaagtctctgagtggcagccagacttccagtgcttggagcaacttatcagggtttagttcctctgcaagctgggaggaagtgaattatcacgttgacgacaggtcagccagaaaagagcctggcaaagaacatctggtggacactcagtgttccactgccttgtctgaggagctagagaatgacagggaaggcagagctatgcattcattgcattcacagcttcatgatctctctcttcaggaacccaacaatgacaatttggagccttctcaaaatcagccacagcaacagatgcccttgacacccttctcgcctcataataccccaggcattttcttggcccctggtgcagggcttctagaaggagctccagaaggtatccaggaagtcagaaatatgggacccagaaatacttctgctcactccagaccctcatatcgttctgcttcttggtcttctgattctggtaggcccaagaatatgggcacacatccttcagtccaaaaagaagaagcctttgaaataattgttgagtttccagaaaccaactgcgatgtcaaagacaggcaggggaaagagcagggagaagaaattagtgaaagaggcgcaggccctacatttaaagctagtccctcctgggttgacccagaaggagaaacagcagaaagcactgaagatgcacccttagactttcacagggtcctgcacaattctctgggaaacatttccatgctgccatgtagctccttcacccctaattggcctgttcaaaatcctgactccagaaaaagtggtggcccagtcgcagagcagggcatcgaccctgatgcctccacagtggatgaggaggggcaactgctcgacagcatggatgttccctgcacaaatgggcacggctctcatagactgtgcattctgagacagccgcctggtcagagggcggagacccccaattcctctgtaagcggtaacatcctcttccctgtcctcagcgaggactgcactaccacagaggaaggaaatcagcctggaaacatgctaaactgcagccagaactccagctcatcctcagtgtggtggctgaaatcacctgcattttccagtggttcttctgagggggacagcccttggtcctatctgaattccagtgggagttcttgggtttcattgccgggaaagatgaggaaagagatccttgaggctcgcaccttgcaacctgatgactttgaaaagctgttggcaggagtgaggcatgattggctgtttcagagactagagaatacgggggtttttaagcccagtcaactccaccgagcacatagtgctcttttgttaaaatattcaaaaaaatctgaactgtggacggcccaggaaactattgtctatttgggggactacttgactgtgaagaaaaaggcagacaaagaaatgctttttgggttcatcatcttcatcaagaagaaattctggggaggtatgttgggaaagactataaggagcagaaggggctctggcaccacttcactgatgtggagcgacagatgaccgcacagcactatgtgacagaatttaacaagagactctatgaacaaaacattcccacccagatattctacatcccatccacaatactactgattttagaggacaagacaataaagggatgtatcagtgtggagccttacatactgggagaatttgtaaaattgtcaaataacacgaaagtggtgaaaacagaatacaaagccacagaatatggcttggcctatggccatttttcttatgagttttctaatcatagagatgttgtggtcgatttacaaggttgggtaaccggtaatggaaaaggactcatctacctcacagatccccagattcactccgttgatcagaaagttttcactaccaattttggaaagagaggaattttttacttctttaataaccagcatgtggaatgtaatgaaatctgccatcgtctttctttgactagaccttcaatggagaaaccatgcacatagaatacggcacagtctggtcctttggggcttgggcagggccgtgacacaggttctggccaatgatttgcaagaggaattgatcagtatcactttaagtcctgcatttaattggcagcacaagatcctgcagagcctctttccctctgccacagttatcaagaatgggtcaggagaccgctgcttctgggcataagtcctgcaaggaaagcaacatggaaaacagccccaactcacccatgagggatgaaaagcactcttgagaaaggcatgtgttgtttaagccattgagattttagagctttttgtcactatctgtcaagactgatactactggggcttttcctattgatttgggagttctttacatattaaaaaaatgtgagcctttgtgatacgaaaaaaaaaaaaaaaa

SEQ ID NO: 27889 - DNA, 4128 bp, Homo Sapiens
gcggcgcccagggaaccggcggaggcgatgaccgtgacggctgggttgggaccggaacgccgaagcggggttgggggtggcagaaaagcatctgctttgtaagacctacacgaggtgcaggagtggttgggcctcccctctccacttaagcaagcgcccagactgatggcgatggtgatggcagcagttactcgcacaaccccagttaagctgcgctccgggaggagttcatctgttgtctgctctccagtgacttccgtttgtggagcctaagtgtttctacagaatccaactcaaatatcaaggactatgatcagaatgctttcaaggagtttttgggcacatgatggcagatacatccagaaagtgcccagaagaaacttcctgctggaaaaaatgaaaaagcagtatttataacattagaatctggataatttgttaacatggcagaaaataatgaaaatattagtaaaaatgtagatgtaaggcccaaaactagtcggagcagaagtgccgacagaaaagacggttatgtgtggagtggaaagaagttatcttggtcaaaaaagagtgagagttattcagatgctgagacagtgaatggtatagagaaaaccgaagtgtctttaaggaaccaagaaaggaagcacagctgttcatccattgagttggacttagatcattcctgtgggcatcgatttttaggccgatctcttaaacagaaactgcaagatgccgtggggcagtgttttccaataaagaattgtagtagtcggcactcttcagggcttccgtctaaaaggaaaattcatatcagtgaactcatgttagataagtgtcctttcccacctcgatcagatttagcctttaggtggcattttattaaacgacacactgctcctataaattccaaatcagatgaatgggtaagcacagacttgtctcagactgaattgagggatggtcagctaaaacgaagaaatatggaagaaaatataaactgtttctcacataccaatgttcagccctgtgtcataaccaccgacaatgctttgtgtagagaaggtcctatgactggctctgtgatgaacctggtttcaaataacagtatagaagatagtgatatggattccgatgatgaaattctaacactttgcacaagttccagaaaaagaaacaaacccaaatgggatttggatgatgaaatcctgcagttggaaacacctcctaaataccacacgcagattgattatgtccactgtcttgtaccagacctccttcagatcaataacaacccatgttactggggagtgatggataaatacgcagccgaagcactactggaaggaaaaccagagggtacctttttacttcgagactcagcacaggaagactatttattctctgttagttttagacgctatagtcgttctcttcatgctagaattgaacagtggaatcacaactttagctttgatgcacatgacccctgtgtcttccattctcctgacattactgggctcctagaacattataaggacccaagcgcctgtatgttctttgaaccacttctatccactcccttaattcggactttccctttttccctgcagcatatatgcagaacagttatttgtaactgtacaacttatgatggcatcgatgcccttccaattccttcttctatgaaattatatctgaaggaatatcattataaatcaaaagttagagtactcaggattgatgcaccagaacagcaatgctagtaacaggatgggaacatgggaatgataatatatattttttcttttaatattttatttttctttttatgccactttggatttttctacaaaggcagtggtgtccaaaataaaatctctgccctaaattttactaataaatccatttttctagtgatacacaaattgtttaaggttatacactcgagcttaaatagatatttttaaccaggtgtttggtttttgtttttaccgtgtaggttgtatacttacattttttctttccttaatttatacatgatcctttttccttaatttatacatgatccaggcacatttgaaatttggtaggcattgcaaacacatttgaatattgtgtatttcatactattctttaaaagtaatcttatgtcctttcctacatgtaaaatattttgttaatctatgccattagtagtattatatataaaatatagttccccgtcccccttttcattgagtttgatattcttcagtaaagctgaatgttgtaattcaccattcatactaatgttattgacttttgtaacttactaatagggatgttaaaagtaacaaaaccaagtcaaacttggtgtatttttattttaaatattaactctaaagcaggattactaaatttgattaatctggtcaatgagaatcaaatggaaacatatcattctggaggtgcacttactcttctacaatgtggccggatcatttgtcattcctgaataggtctttctctcaacctgcaagagctaaaccatcttcaaaacataaatcttgttcctttctcattggaagctttgaaaataatgataacactattagtagctagtagttactaaagtgctaaagtaattgtggggtttttctgtattagcttatgaactgttgcttctacttagcccttttatagaaactctgagctgttactttggggaaattccacaatgtattagcagccacaaatttccactggtaaccaaagagtacctaagtagtttttcattattttaagttgaatttgaataaagattccagaaataaacatggagctcagtattcaggaagcttaatactgtttttgatctacaagatccaaataattatccctatcttcagaattaacttagtctgtaatgtggcttcaaaaaaagaaagccttttgacagctacatgacttacaccatacagaacagtactggacaaaaggggtgatattttaaatttactatcccagaaacagggcaacgtttttagaaacatctttagcccaaagtaactagtaaaaataaatggagtggtatcctatcttctttttttaaggaatcaatgaataataaatgtagatagacaattttcttctggtgagctgtctaaccctttgtacacattgacatttttaatatcgtaactgatttcttgatgctagtttagctatattaggaaactgcttctacctagattgaaagaaatttgactcataaacttccaagttagaacaaatatttcttcattattgttgcttttatgtgagtagcatttccctatcttgcagttctgttaacatgaaaatggcatttttccataatagctttaaaataattttttagtaattattacaaaattaaggaaaatctctattaccgttatcttttagcattttttttttcctcagtgatctcaagattgtcttagtctcaatgagatgtagctacaaaaatggcacctcttagcagtgatgaggctcaggatatcggatatcataacaccaatgtcaggataaatatctcttctaaagacgatatttaccttttacaaggttagaaaagtctcatactacctcatctttattgtggcgcttttgtagatcactgagaagcttatcttattaaccaatataccacttcctaaatatccatctttggtgaaagaaaatagtgtggtaagagtacccatgattatagttttttatcagaatttgataagattttctgtttctgtgaaacaattattttaaatatttttcttttaaaaataactttttatcagtacagaaaaacctaagggatgactagcttacaaatattctgttaaggggtagttttataaagaaaaatgatatatagttatgttgtcttttatagtgttaaaattagtatttatatgaaagtcaagatctaagtaccttttcatataattcaaactgattgcttgtgatatgttttctctggcttttttattttttcaacttcaaggtattaacagctgttaacacttaaaaagtactgccacatatgtagccttgaagtagttgatctaataaatgagagcagggaggagaaaaaaaaaaaaaaaa

SEQ ID NO: 27890 - DNA, 3358 bp, Homo Sapiens
gtggctgccgtctgtccccgctgaggaggtgcagcagccggagatggcggcggtgctgaacgcagagcgactcgaggtgtccgtcgacggcctcacgctcagcccggacccggaggagcggcctggggcggagggcgccccgctgctgccgccaccgctgccaccgccctcgccacctggatccggtcgcggcccgggcgcctcaggggagcagcccgagcccggggaggcggcggctgggggcgcggcggaggaggcgcggcggctggagcagcgctggggtttcggcctggaggagttgtacggcctggcactgcgcttcttcaaagaaaaagatggcaaagcatttcatccaacttatgaagaaaaattgaagcttgtggcactgcataagcaagttcttatgggcccatataatccagacacttgtcctgaggttggattctttgatgtgttggggaatgacaggaggagagaatgggcagccctgggaaacatgtctaaagaggatgccatggtggagtttgtcaagctcttaaataggtgttgccatctcttttcaacatatgttgcgtcccacaaaatagagaaggaagagcaagaaaaaaaaaggaaggaggaagaggagcgaaggcggcgtgaagaggaagaaagagaacgtctgcaaaaggaggaagagaaacgtaggagagaagaagaggaaaggcttcgacgggaggaagaggaaaggagacggatagaagaagaaaggcttcggttggagcagcaaaagcagcagataatggcagctttaaactcccagactgccgtgcagttccagcagtatgcagcccaacagtatccagggaactacgaacagcagcaaattctcatccgccagttgcaggagcaacactatcagcagtacatgcagcagttgtatcaagtccagcttgcacagcaacaggcagcattacagaaacaacaggaagtagtagtggctgggtcttccttgcctacatcatcaaaagtgaatgcaactgtaccaagtaatatgatgtcagttaatggacaggccaaaacacacactgacagctccgaaaaagaactggaaccagaagctgcagaagaagccctggagaatggaccaaaagaatctcttccagtaatagcagctccatccatgtggacacgacctcagatcaaagacttcaaagagaagattcagcaggatgcagattccgtgattacagtgggccgaggagaagtggtcactgttcgagtacccacccatgaagaaggatcatatctcttttgggaatttgccacagacaattatgacattgggtttggggtgtattttgaatggacagactctccaaacactgctgtcagcgtgcatgtcagtgagtccagcgatgacgacgaggaggaagaagaaaacatcggttgtgaagagaaagccaaaaagaatgccaacaggcctttgctggatgagattgtgcctgtgtaccgacgggactgtcatgaggaggtgtatgctggcagccatcaatatccagggagaggagtctatctcctcaagtttgacaactcctactctttgtggcggtcaaaatcagtctactacagagtctattatactagataaaaatgttgttacaaagtctggagtctagggttgggcagaagatgacatttaatttggaaatttctttttacttttgtggagcattagagtcacagtttaccttattgatattggtctgatggtttgtgaactcttgctgggaatcaaaatttccttgagactctttagcattcatactttggggttaaaggagattcctcagactcatccagcccttgggtgctgaccagcagagtcactagtggatgctgaagttacatgagctacatgttaaatatttaaagtctccaaaataaaacaccccagcgttgaccttacccggctgatggttagccccttgctgcctgctccatgtgtcttatgagagcccgtagttacagtgtcctctaatttgaaatccataagttaacaagtctatatcaggtgcagctggctttgattaaaggccatttttaaaacttaaaaactcaacacctcacagattataatagaaaaagaaatggcctcagtttgatctcgttcagaatgacccagattgtttctgctttgggtgcagctgtttagttcagagttatattacagagaattattttctgagataatcttaaactagaatgttcaaaactaattgataattgaagtatcaagatacgtagaacacctcagagatttttcttcaggaacttccacaaactttgaatccttgtatctttatttggtattcatactactagtagcaaaatacaggttttttgttttgttttgttttggcttcatagagtatctcaaattgaaacttttctgcacaaagaataaaattaaggattttataaactcaaattggcacctactgaattaaaatacataaaatcatttaaatataattcagcatatgggaagtaacattgcactaatatggaaatcactgccagagacagtctattttcttttaatttgttactacttagtcacaaaccccacattattccagtttggaattacttattaaggagaattggaaatacatatgcccatgcttaaattttatagctttaatttgtgttatttctttattgacgggaagaggtacatctttttttccttactgaaaacaaatatggattaattgcctcaaatttgtataagtgattggctagtgattcttgttttcagaagggagagtggtatagatagaaaatgacaaagatggcaatatacacttaatgttgttattgtatgttgttactgaagtacttagatttttaaaatttcaaatcctaaatcacttcttgtaggagggttttcattaactgcagtatatacagttcactacatatgggttgtttgagttttttgtgtgctgtatttctttctgttttttaatacctggttttgtacatatctaactctgtttctcttttggttgttcagaaactggattttttttttcttaagcagtgcttaatttgtgttttttaattttgattcagaagtagtcccagctcataggtgttcatactgttacatccagaacatttgtcaggctctctgtcagctttcatgtacatatggtatagaaaccatggagttaggcacttcctggatttttttttttatgagaaaaatactgtatttaaaatgtaaaataaacttttaaaaagcaggcactaaaaaaaaaaaaaaaaaaaaaaaaaaaaaaaaaaaaaaaaaagaaaaaaaaaaaaaaaa

SEQ ID NO: 27891 - DNA, 3796 bp, Homo Sapiens
gcatactgctagtggcgcgcggaggagcgacgcgtggagaagcggcccacgtgtctgcccagagtcaagtcctgtgttcttcccgctccttacgcatccgcggtccagggcgccctttcagccccgctggtgttcgcccaccccgggccgcgtgagtggggccccacgcagctccccgcactccgtgggccaacttggccaagcaactctgtccggggagcggtgcttgcggggggtgagtaccgggcactgcgcatgcggagctccaaattcaaacagctgttttcagaggctggagggcgggcggactggtagcagctggggctaggagaggctttctctaggaggcggccgctcgggagccatggtggaccggggccctctgctcacctcggccatcatcttctacctggccatcggggcggcgatcttcgaagtgctggaggagccacactggaaggaggccaagaaaaactactacacacagaagctgcatctgctcaaggagttcccgtgcctgggtcaggagggcctggacaagatcctagaggtggtatctgatgctgcaggacagggtgtggccatcacagggaaccagaccttcaacaactggaactggcccaatgcaatgatttttgcagcgaccgtcattaccaccattggatatggcaatgtggctcccaagacccccgccggtcgcctcttctgtgttttctatggtctcttcggggtgccgctctgcctgacgtggatcagtgccctgggcaagttcttcgggggacgtgccaagagactagggcagttccttaccaagagaggtgtgagtctgcggaaggcgcagatcacgtgcacagtcatcttcatcgtgtggggcgtcctagtccacctggtgatcccacccttcgtattcatggtgactgaggggtggaactacatcgagggcctctactactccttcatcaccatctccaccatcggcttcggtgactttgtggccggtgtgaaccccagcgccaactaccacgccctgtaccgctacttcgtggagctctggatctacttggggctggcctggctgtccctttttgtcaactggaaggtgagcatgtttgtggaagtccacaaagccattaagaagcggcggcggcgacggaaggagtcctttgagagctccccacactcccggaaggccctgcaggtgaaggggagcacagcctccaaggacgtcaacatcttcagctttctttccaagaaggaagagacctacaacgacctcatcaagcagatcgggaagaaggccatgaagacaagcgggggtggggagacgggcccgggcccagggctggggcctcaaggcggtgggctcccagcactgcccccttccctggtgcccctggtagtctactccaagaaccgggtgcccaccttggaagaggtgtcacagacactgaggagcaaaggccacgtatcaaggtccccagatgaggaggctgtggcacgggcccctgaagacagctcccctgcccccgaggtgttcatgaaccagctggaccgcatcagcgaggaatgcgagccatgggacgcccaggactaccacccactcatcttccaggacgccagcatcaccttcgtgaacacggaggctggcctctcagacgaggagacctccaagtcctcgctagaggacaacttggcaggggaggagagcccccagcagggggctgaagccaaggcgcccctgaacatgggcgagttcccctcctcctccgagtccaccttcaccagcactgagtctgagctctctgtgccttacgaacagctgatgaatgagtacaacaaggctaacagccccaagggcacatgaggcagggccggctccccaccccacctttgatggcctcttcccccctcaccctagggtgtcccgagatgaccgggacgcctggcccctggtgggggggcagcctcggaactgggagtggggggccaggggccttcctaaccttccatcatcctcagctagatgtatgcccgggacagggcctctgttctccagctgaaccataccctggctgtgggggcatctgtcctgagcttggctggtgtatctcacaatgcaaagacatgctggctggcgggacaggtgggcaggactgaccctgaggaggccttgcctgcagggtctttgtctcaccatttggtggagtatcacacggttctctgaggtctggggcctcagctgtttaagtttaccggtattactgagctcggcatttggagagggagctctgaagtgtctggggaggtaccgctgtgcgtggggtcaggtgtttccgtaccacagcaggagcagggcccgcccgcatcccagctgtgggcctgccggtcaggtcgggcacctactacaaaccgtagtggggtggaggctgctggaggtgggagtgaggagatgagggcagggtctcaaacagtcctgactcacagggcctggaaacaagtcctatgtgggcctggggcctggggtcctcatcctccttgttggtctactcaggcccagcccagagctgtgttccctgtctcaggtcaagcagtggcagacgcaaggctttctgtgggcccccaagtggtaggagggagagtagcagagcatgggttactggaagccgggactgctagggctggtggccagggagctgcaagagtgaggctcagctctggctggttctgcccttacccctcctgcccgcctgagaactgcacaccctgcccgctggccccaggacctgcactcccaatcctgctgtcttctccttccctgtgccctgaacaaggacctcactgcccgccttcccctcccaccagcccccttgggccaggcagggtgaggccaaattgctcttggcccacaaatgggtgatggtcagatatgtgaatcaagctcctttctctagctagtgtttgatgtgcacgtgtgtgtgcacagtgcgtgtgtgcacacgcacacctgtgcactcgtgtgtgtttaagaaaggaaaggatttgggctggggagcaaaagataatgtgaaactgttggtggactctctggtgaggggtgggcagaacttgctgctactagagttcttgggttctccatgatgttcaccctggggctggcccactgtgtcctgaatgtttttgttattttttgttttattttttaaacaaactgctgtttttatatacctggaatctgttgttggcttcagagccagtggttaaagagcagggtcccaaggattgggagatctagtgtctgccctcctgccctgcaactcaattgggcctttttcggtgacctcatccaaggccatgatgtcaagggccatgtccccaagcagaggtggagaaggggacactgaggtgagcaaaagcaggaaggggcatccactgcgggtgactggaggccgggcaggaagcaagtcatcagagccgctcagctccgttcactctctgccttctgccccactactgtggggcagtggggccagagcccacctccccaacatgtgaagacagtgatgggcacgtgcccacacccccacttctctagccgtttgcagaggccgccacccagcaggggcctgaaaaggagctgcctcgtatttttctgtgaaatgttttaatgaaccatgttgttgctggttgtcctggcatcgcgcacactgtatgtacatactggcaacgatgtcaaatgtaatttattttaacatttttacaataaaacatgaggtggacaggcaaaaaaaaaaaaaaa

SEQ ID NO: 27892 - DNA, 4035 bp, Homo Sapiens
gaggaggcggggtcacgagccgccagccgccgggtggagggtcccggccgggagccgcggaaagagtagggctccccagacaacggggtccgacgagcagttgggcacgggctgagtccgcctgccggcagaatgtccctggctgcttattgcgtcatctgttgcagaagaataggaacctctacttccccaccaaaaagtggcacacactggagagatatcagaaatataataaagtttactggatcacttattttaggaggttctttatttcttacatatgaagttctggccctgaagaaggctgtgacattagatactcaagtggtagaacgagaaaaaatgaagtcatatatatatgtgcacacagtttctttagataaaggagaaaatcatggtattgcctggcaggcaagaaaagaacttcacaaagcagtaagaaaagtattggcaacatcagccaagatactgcggaatccatttgctgatccttttagtacagttgatatagaagatcatgagtgtgctgtgtggctgctcctacggaagagcaagtcagatgacaaaaccacgcgactcgaggctgtgcgggaaatgtcggagacccatcactggcatgattaccagtataggataattgctcaagcctgtgatccgaaaactcttattggtttggcacgaagcgaagagagtgatcttcgctttttttctcctaccacctcctttgccatctttaaaagaagattcttccactgaagaagagctcagacagttgctggcttccttacctcaaacagagctaaatgagtgtatccagtattttacatctttggctcttagtgaaagcagtcagagtctagctgctcagaagggtggtttatggtgttttggaggaaatggacttccttatgctgaaagttttggagaagttccttcagcaacagtggaaatgttctgtttagaagctatagtaaaacattctgagatatccacacattgtgataaaatcgaagcaaatggaggcctgcagctacttcagaggctgtaccgacttcacaaggactgccctaaagtacagagaaatataatgcgtgtcattggaaatatggctttgaatgaacatcttcattcttctatagttcgctcaggctgggtttccatcatggcagaagcaatgaaatctccccacattatggagtcctcacacgctgccagaatcctggcaaatctagaccgagaaactgtgcaagaaaaatatcaggatggcgtatatgtgctgcatccccaatatcgaacaagtcagcccattaaagcagatgtcatttttattcatggccttatgggagcagcattcaaaacatggcgccagcaggacagtgagcaggctgtaattgaaaaacctatggaggatgaagacagatatacgacgtgctggcccaagacatggttagcaaaagactgtcctgctctccgaattatatctgtggagtatgacaccagcctcagcgactggagagcaaggtgccctatggaaagaaagtccattgcattcagaagcaacgaacttcttaggaagctcagagctgctggtgttggggataggccagtggtttggatatcacatagcatgggaggtcttcttgtcaaaaagatgctgttggaagcctctacgaagccagaaatgagtactgttatcaacaataccagaggaataattttttatagtgtccctcatcatggatcacgtttggctgaatactctgttaatattcgctatcttctcttcccctcgttggaagtcaaagaactcagcaaggattctcctgcacttaaaacactacaagatgactttctggagtttgctaaagacaaaaacttccaggtgctgaattttgtggaaacactaccaacctacattggcacatgattaagctccatgtggtacctgtggaatcagcagatttaggcattggagatctaattcctgtggatgttaaccatttgaacatttgtaagccaaagaaaaaggatgcttttttgtaccagcgtactttacaattcattcgtgaagctttagccaaagaccttgaaaactaacagttgtgctcttccagttttcatatgtgaattcagtgcaagaaacttggtgttctgtttcttcttttaagctctatgcaatcatgcaaacatagtgatcatagcgtcaacatggtctggagtgtgttgcagactacagaacattgttctcccttcaagcgctgtaaagcaccaacccggaagtggcaggcacagaaggaagggctggattgggcccctttggtgtaaagaagtccctgtgtgctgctttatggttcgcagtgttgggcttggtgactggagcaaagctgctgtgagagagtgtcctttcccatctgtgactttcctggtgcatccaggaggggcacggcaggttctgaggtaactcaacttaccataaaaatgccattaagagagtacctaaaatggagagaagaatgaactagaacattcaagactcttttacttctgggtattgatttgctgtacatttttaaagtttgagtttttagctcagttctaccttttatctgacacattattactagtgttaactttgttagacttattgtcatgtctgggtcagttccttgtatctattttcgtattcctgagaacaaatctttttcttagaaaaattctagcttataataattcttttcagactgtagctgcctatgcttggaatttgtcctagataaggataaagtagctaatccattattgatcacagtatgaagtaaaactattctaagccattatatgaattagcaattcttagtatcaagattctcagattctctttggctaaataaacctttcttcttccttgctcatttgcaagtggtattaattgacctctatagcatgtgagtagtagataatcatgtcgatgaccttttttctttagagtaacagcattattgagatataatttacataccataagattcacccttttaaattatacaattcatttttgttttgttttgtttgtttagagacagggtctgactctgttgcccaagctggagtgcagtggcatgatcatagctcattgtaacctcaaactcctgggctcaagagatccttttgcttcagcctcccaagcagctaggactacaggcacatgccaccacacttgggtaattaaaaaataaataaatacttttttgtagagacagggtctcactgtgttgcccaggtctcaaactcccgatctcaagccaccctcccaaaatgctgtgattataggccagagccattgttcccaggctcaattcattggtttttagtatagttcactgagttgtgcaacatcattgctatttaatttcaggctatttcatcatccccaaaagaaccccatacccatgagcagtcagttcccacctctgctttcccaagcctgcggtaaacactaatctgttttctgtctctatggatttgggaattttatgtaaatggaatcatacaatatgtggccctctctgccttcttccttctattagcatgttttcaaggttcattcatgatatagcatgtatcagtactacttcatttctttttatggccgaaattactccattgtatgatatgccatgtttctttatccattcatcagctgatggacatctaggttctgttcatttttgtctatgataaataatgctaccatgatcatttgtgtacaaatttatgtgtggatagatgtttttgattctcttgggtggaattgctggtcaaatggtaagtctatgtttaaattttgaagatggtgaacttttgtagaatgagatagtcgaagctaaaactggagtatggcatctgaaggtaaatggctcatcaataaactcgatatcaacaattaaaaaaaaaaaaaaaaaaaaaaaaaaaaaaaaaaaaaaaaaaaaaaaaaaaaaaaaaaaaaaaaaaaaaaggaaaaaaaaaaaaaaaaaa

SEQ ID NO: 27893 - DNA, 2797 bp, Homo Sapiens
gtctcgccgcgcttcccagcgaggccgccggcgcgccgagggctgtgctcgaccgcgaatcccgtgtgcagtcgccccgcgccccgcgcgacccttcgggtaaactacgaactgggagttctgaagaatgggtaaagactttcgttactatttccagcatccctggtctcgcatgattgtggcttacttggtgatcttctttaacttcttaatatttgcggaggacccagtttctcatagccaaacagaagccaatgttattgttgttggaaactgtttttcatttgttacaaataaataccctagaggagttggctggaggattttgaaggtgcttctatggctacttgccattctcacaggactaatagctggcaaatttctgttccatcagcgtttgtttggtcagttgctccgattaaaaatgtttcgagaagatcatgggtcgtggatgacaatgttcttcagcacaattctctttctcttcatattttctcacatatacaacacgattcttctaatggatgggaacatgggagcatatatcattacagactatatgggcatccgaaatgaaagtttcatgaaattagctgcagtagggacctggatgggggactttgtcacagcttggatggtcactgatatgatgcttcaggacaaaccctatcctgactggggaaaatcagcaagagctttctggaagaaaggaaatgttaggatcactttattctggacagttctttttactctgacgtctgtggttgtacttgtgattacaacggactggatcagctgggacaagctgaatcggggatttttgcccagtgatgaagtttccagagcattccttgcttcttttatcttggtctttgaccttcttattgtgatgcaggactgggaattcccacatttcatgggagatgttgatgtaaatctccctggtttgcacacccctcacatgcagttcaagattcctttcttccagaaaatcttcaaggaggaatatcgtattcacataacaggcaaatggtttaactatggaattatcttcctcgtcttgattttggatcttaatatgtggaagaaccaaatattttataaacctcatgaatatgggcaatatatcggcccggggcagaagatatatacagtgaaagactcagaaagtttaaaagatttgaacagaaccaagctatcctgggaatggaggtccaatcacactaaccctcggactaataaaacatatgttgagggagacatgttcttacacagcaggttcataggagccagtcttgatgtcaagtgtctggcctttgttccaagcctgatagcctttgtgtggtttggattctttatttggttctttggacgatttttgaaaaatgagccacgcatggagaatcaagacaaaacttacactcgcatgaaaagaaaatctccatcagaacatagcaaagacatgggaatcactcgagaaaacacccaggcttcagtagaagaccccttgaatgacccttctttggtttgcatcaggtctgacttcaatgagatcgtctacaagtcttcccacctaacctcggaaaacttgagctcacagttgaacgaatctactagtgcaacagaagctgatcaagacccaacgacttctaaaagtacacctacgaactagactcggagatagacttggagataacacaaaaagcaaccttgagtgtaactttaaaaatttagtctttccttttgtatatgtaaggtttacgtagtgttaggtaaaaatatgaacaatgccacaacggtgctcaacatgctttttctaggattcattgttttctatttgtattataatacacgtgcctactgtatactcaacagtcctctagagattgcttttcacaattgcacaagctattactgactttacagcatagtggaagattagctgatgacccatgtatctgatgttcaaccatagtggtgccttgagacattaaactgtttttaactgtaccagaaatgaagtgtggaacagttacctaacctatttcacatgggcgttttgtatacaactattttgatctacacttgatgtctgagcagaaaacagaaatagctaaatgtgactcaggaagtatctcttggtttcttattcagcagcagagttggtgactttgacaactggactgcagagaaacatggtgatcaccttttaatttttattggctgtctgccaaatataaatacagatgcaaaattcagtaataggagatccataacccaacatgggtcactactcgtgaaatgtgactttctcccaccagtaattgaaatgaggtgatgatacctaattatgttttcctaattaaagataaattgctacttgattaaaaatcctgcccttcacctttgggaacaaaggttaagagacacagttgggcgaactctcaaatttattggcatttacacaaagtcccagacaaccaaggaactgaagttttcatcatatgagagcagcacatcccaccatttacaatattcgtatatctttctgcaaatatggctctggatagtgaaaattgaaaaacatatgccaaccctgagcaagggaactcctcaaaaaatcatgcagcggaaccttgtcaggtagagaagccgtgcatgaaagaatttgtttaatgtcttgttttgcgtatgtgttttttgtttttgttttttaagaactaaatattgcacattaataaataagaattatacagcaaaaaaaaaaaaaaaaaaaaaaaagaaaaaaaaaaaaaaa

SEQ ID NO: 27894 - DNA, 4078 bp, Homo Sapiens
gacttccggctacgccgttgtctgggtggcgcggtcgagtcatcgcagggcctcaccgcttcgttctcccgtccctccccgcgccttggcgcggggggtcgactagccaagtgaggcgggaggcgactcggacctttccctgcatttcgtttcggccagtgccgggggctacccgccctggggcctgggatccttggggcccgtgaggcccactcttagcggccggggcctaccgcggcccgccgctggccctcatgaggcatagcctgaccaagctgctggcagcctcgggcagcaacttcccaacccgcagtgagagcccggagccggctgcaacttgttcgctgccctctgacctgacccgggctgcagcgggggaggaggagacggcggcggccggatctcccggccgcaagcagcagtttggcgacgaaggagagttggaagccgggagggggagccgcggcggcgtggccgtgcgcgcgccctcccccgaggagatggaggaggaggcgatcgccagcctcccgggggaagagacggaggatatggactttctgtctgggctggaactggcggatctcctggaccccaggcaaccggactggcacctggaccccgggcttagctcgccggggcctctctcctcgtctggcggaggctcggatagcggcggcctgtggagaggggacgatgacgatgaggccgcggctgctgaaatgcagcgcttctctgacctgctgcaaaggctgttaaacggtatcggaggctgcagcagcagcagtgacagtggcagcgccgaaaagaggcggagaaagtccccaggaggaggcggcggtggcggcagcggtaacgacaacaaccaggcggcgacaaagagtccccggaaggcggcggcggccgctgcccgccttaatcgactgaagaagaaggagtacgtgatggggctggagagtcgagtccggggtctggcagccgagaaccaggagctgcgggccgagaatcgggagctgggcaaacgcgtacaggcactgcaggaggagagtcgctacctacgggcagtcttagccaacgagactggactggctcgcttgctgagccggctgagcggcgtgggactgcggctgaccacctcgctcttcagagactcgcccgccggtgaccacgactacgctctgccggtgggaaagcagaagcaggacctgctggaagaggacgactcggcgggaggagtctgtctccatgtggacaaggataaggtgtcggtggagttctgctcggcgtgcgcccggaaggcgtcgtcttctcttaaaatgtagggtcaagtaatctgctctttatccgcgtttacccctttcaactcccttacaccatgtcaaacttaccttagtgggacatcttcaccggacacatttcagaggagagaaaaaaagtaatattgaatcttaaagtgtttagctaaaagcatgaatgtgacacagtaaccaactcctaatgataacatgtgactattaaatctctctgacagtttcttttttaggtgatttccttcctgccaggctccgttgtaggggttacagaacagtcgttcccgcctcacaacctggtaaggatccatctcttcccgtaacgctcatgctctgctgctttgtctactttaatgggcaacatctcagtttgtgtgtgtgtgattttttttttttttttctgttttggaaggtgggagggaaatctaatttgggccctgtccaccctggaaacagacttgtgctggtcaagaatgtatttaagatgcctcttctggttgaaatagctattaatgtgtccccttattcagacttgcgtgtacctagctcttctgtccccagtgtggacatggccttggatgacatcggttccaactgtacactgaaacctgcttatagagagacagtttggagacagtgaaacaggtgaagttgaatggaagttccgagttgtacaaggtgcaaattggaattccgattttagggcaacttttcagaggttgacagttaagtatttggggcatgcacaaatgtgatagttattttgctggaggtgacaggtatctcttaaatatcaacaatgccttttagttttcagtatgagatatagaaacagtctataatggagtaacattttaatgtctcaccattagagaagttggaaattaacatacatatgagactcctgcgttttagttaattggagaataagaatggctaatgtttctttgaggaccagcagtgattaccctatcactgagattgaataaattgttgaacatctttatttttgttgtattaaaattttaggttaaatttatatatgtatgattagatattgaaggttgtgaaatgtgaatgaaaacgtgtaaagtgaggcttcacaaagaatcttattctctgtgtttcaaaagtatttgtcctattttaaaataattttttaaattgagtggttctggccacttaaatgacacgattggtactattttcctaaggtgggatttattcccttgaatctattaaccagttgtataaattgaattatggtgtccttcagtgtaagaggcattaagaaattctttgtgaaacatcactgcttgataaagtatatacgtatttagcatccttgtttttctttgtgctaaagtggatacagctgttggggcagaagagacgggaccagctgctggccacatttcctgctttattttaaaaggtagtataagaaatgaggaaaaagaggtaatatcagggcttctgctgttttttatttttaacatgttcataattaaaaagtattttccagcagtccaaagatgtaagttatcttacacataaaatgttttattttgttatttggttatgaaaatggaatccttgttcttgcacaactgtaaatgttttgttgctagataatacgatttgagacctgaattggtctttggtttccagtgcatcacagcatattttgtaaaatcatctactactgcacttgagcatgaatgggtagtagccaaactcacaaattggagtgatgaacctgcttatacctaagggcaggagcaagcccctcacaatgcagctgcatgggtttttagtgcctactgaattatatatatatatacatatatatatatatatataaaccaaaagtagttggaaagattatttgaaatgactaatttgtgctatctttatgaaatatgttaaatgtagcttttttgaaacagaagccttgaattgaaatttaactaatacttgaacattttgtatatatttctttgtatataattttgtgcagtaccaatgacaaaaatatggtgtcataataaaaccaggtttgttgatcttttagttatgggctcaaagaatttattcatctctaacatgatattggaaaataatggatgaaaataggaaaaatgattgttaatgctgactgtgggtcttaaaaggttctggaaagcagtaagttcatttttctaaaaactataacattctgttggagtattttcttccttacgtcaatacttttcctgcattatttgaaattgtgggctggggagaaacagtagtcaaagctttctgaattgagatactttgaaattccaagtgtagatttttagaatgtcattttataaatggcagtttttggaattacttgataagaacttttgaaaatggaaggattagtatggcctatttttaaagctgctttgttaggttccttatgttttattaactgtcttttctcagtttccatttcatttttttttttctagttttggtgacttagtgattttgtcattttttacatcaacttcatggtcttgtttttacatggtaattgcatgtacttaggatctatctaataggggctttaaataaatttggtcatatttatgtgtaagcacattttactgtaaatgtttgggtttctgaatttaaacagatctgtttatttcagtatgtagtaaacaatatcttaaagtgtccgattcactacttgttaattaaaaaagttatgattaatgcgaaaaaaaaaaaaaaaa

SEQ ID NO: 27895 - DNA, 3067 bp, Homo Sapiens
agttacaaggctccatcctcactttgttcgctcctcagtcgtccaggcggattcctttttcgccaggcaccaaggcacagcttagagtagacccgagtcctgctctgcggagttcgtcttcccagcgaaggtacagaggcggatgaactgctgagacttgattgacgtattttaagatttttttaacttctgaagtctagcaggcctgtaagaacaaaaatcattctgtaggaattaaaaacagaatccagtcttgacaacatatccacaatgtctgatgtatctactagtgtacaatcaaaatttgctagacttgcaaagaaaaaggaaaatatcacctatatgaaaagagagcagttaacagaaactgataaggacatagctccggtattagatttaaaatgcaaggacgtatcagcaattatgaataagtttaaggtcttaatggaaattcaagacctgatgtttgaggagatgagggaaactcttaaaaatgacctaaaagcagttttaggaggaaaagctacaatacctgaggtaaagaattcagagaactccagtagtaggacagagtttcagcaaataatcaatttagcattacaaaaaacagggatggtagggaaaatagaaggagaaaactctaaaataggtgatgataatgaaaatttaacctttaaattagaagtaaatgagctgagtggtaaattagacaacactaacgaatacaatagtaatgatggtaagaaattaccccagggtgaatcacgaagttacgaagtcatgggaagtatggaagaaaccttatgcaatatagatgacagagatggaatcgcaatgtccatttagaatttacagaaagagagagtaggaaggatggagaggatgaatttgtcaaagaaatgagagaggaaagaaaatttcagaaattgaagaataaagaggaggttttaaaagcctccagagaagaaaaagtgttgatggatgaaggagcagcttaccctggcagccgacctttcatcagcaacactggatattagtaagcaatggagtaatgtcttcaacattctgagagaaaatgattttgaacctaaatttctgtgtgaagttaaattagcatttaaatgtgatggtgaaataaagacattttcagatctgcaaagccttagaaaatttgccagccaaaaatcttctatgaaagaattactgaaagatgtactcccacaaaaggaagaaataaatcaaggaggaagaaaatatggaattcaagaaaaaagggataaaaccctaatagactcaaagcatagagctggagaaataaccagtgatggcttgagcttcctatttcttaaagaagtaaaagctgctaagccagaggagatgaaaaacttagagactcaagaggaagagttttccgagctagaggagctggatgaagaggcctcagggatggaggatgatgaagatacctcagggctggaggaggaggaggaagagccctcagggctggaggaggaagaagaagaagaggcctcagggttggaggaggatgaggcctcagggctagaggaggaagaggaacagacttcagaacaggactcaacctttcagggtcatactttggtagatgcaaagcatgaagttgagataaccagtgatggcatggaaactactttcattgactctgtagaggattctgaatcagaggaggaagaggaaggaaagagctctgaaacaggaaaggtaaagactacctccctgactgagaaaaaagcctcacgtagacaaaaagaaattccctttagttatttggttggggactctgggaagaaaaagttggtgaaacaccaggtggtgcacaaaacccaggaggaagaggaaacagctgtgcccacaagtcaaggaactggcacaacctgtctgaccttatgtttggcctctccctcaaagtcactagagatgagtcatgatgagcataaaaagcattcacatacaaatttgagtatttcaacaggagtcaccaaacttaagaaaacagaagaaaagaaacacagaactctgcacacagaagaactaacatccaaagaagcagacttaacagaggaaacagaagaaaacttgagaagtagtgtgattaatagcatcagagagataaaagaggagattggaaatttgaaaagttcccattcaggtgtcttggaaattgaaaattcagtagatgatctgagtagcagaatggacatacttgaagaaagaatagacagtctagaagatcaaattgaagaattctctaaggatacaatgcaaatgaccaaacagataattagtaaagaaaggcaaagagatatagaggagagatctagaagttgcaacattcgtttgataggaattccagaaaaggagagttatgagaatagggcagaggacataattaaagaaataattgatgaaaactttgcagaactaaagaaaggttcaagtcttgagattgtcagtgcttgtcgagtacctagtaaaattgatgaaaagagactgactcctagacacatcttggtgaaattttggaattctagtgataaagagaaaataataagggcttctagagagagaagagaaattacctaccaaggaacaagaatcaggttgacagcagacttatcactggacacactggatgctagaagtaaatggagcaatgtcttcaaagttctgctggaaaaaggctttaatcctagaatcctatatccagccaaaatggcatttgattttaggggtaaaacaaaggtatttcttagtattgaagaatttagagattatgttttgcatatgcccaccttgagagaattactggggaataatataccttagcacgccagggtgactacaaacaatatgctttcctcccccagcatgcatccaaaaatcaacaagtaaaacgaaaatacacttctacccagaaggatggacagctaatagcgtacttggggatgaggagcaaggaatattacagatattacctagatgttaataaagggtatgtttaaaaaaaaaaaagaaaaaaaaaaaaaaa

SEQ ID NO: 27896 - DNA, 3996 bp, Homo Sapiens
gtgggcggggcgccgcgctgacgttgcccgggatgcggacaggttccgccgcctccagcgccgccgccgcagctgccgccgccgccgcctccgcctcgcctgccaccggggtttgtatgaaaacaccgggcggcgggcggcgagggatccgccgtgatccaggtgctgagccgggtgctgcggctctgcgcggtccccgccagcgccccatcctgagccgattatctgcaattatgaaatgaagtaactcaagatgagcaagttaaaagtgataccagaaaaaagccttaccaataattctaggatcgtaggactcctggctcaactggagaagatcaatgctgagccttcagaatcagacactgcccgatatgttacatcaaaaattcttcatctggctcagagtcaagaaaaaacaaggagagaaatgacagccaaaggttctacaggaatggaaattctgctgtcaacattagagaacacaaaagatcttcaaactacacttaatatcttaagcattcttgttgagctggtgtcagctggtggaggtcgaagagtgagtttcttagtcaccaaaggtggttcacaaatattgttgcagttacttatgaatgccagcaaagaatctcccccacatgaggacttaatggtacagattcattctattcttgcaaagattggaccaaaagataaaaaatttggagtaaaggctagaattaatggggctctgaatataaccctgaatttggtcaagcagaatttgcagaatcatcgcttggttctaccttgccttcagcttttacgagtatattctgccaactctgtgaattcagtatccttagggaaaaatggagttgtggaactgatgtttaaaatcattggaccatttagtaagaagaattccagtcttataaaggttgctttagacactcttgctgcattgctaaaatcaaaaacaaatgccaggagagctgtagacagaggatatgtccaagtgcttttaacaatttatgtagattggcaccgccatgataaccggcatagaaacatgctcattcggaaaggaattttacagagtttaaaaagtgttacaaacatcaagttgggaagaaaagcatttattgatgccaatgggatgaaaattctgtataatacttcgcaattgcctgttattcctgtgactggtcctgtggctcagctctacagcttacctcctgaagtggatgacgtagtagatgaaagtgatgacaacgatgatattgatgtagaagctgaaaacgaaactgagaatgaagatgacctagatcaaaattttaagaatgatgatattgaaacagatattaacaaactaaaaccccagcaagaaccgggacgaacaatagaagatctaaaaatgtatgaacaccttttccctgagcttgttgatgattttcaggactatgatttaatctccaaagaaccaaagccttttgtatttgagggaaaagtacgtggtcctattgttgttcctacggcaggcgaggaaacatctgggaattctggcaatttaagaaaagttgtaatgaaggagaacatatcttctaaaggagatgaaggtgaaaagaagtctacctttatggatctagcaaaagaagatattaaagataatgatagaacattacaacagcagccaggtgatcaaaatagaactatttcatcagtccatggtttaaacaatgatattgtaaaggccttggaccgaattacattgcagaatattccttctcaaacagccccaggttttactgcagaaatgaagaaggactgcagtcttcctcttactgtccttacctgtgctaaagcatgtccacacatggctacttgtggaaatgttctgtttgagggaagaacagttcagctagggaagctttgctgcactggagttgaaactgaagatgatgaagatactgagtcaaattcatcggtagaacaagcatcggttgaagtacctgatggaccaacactccatgacccagacctctatattgagattgtgaaaaatacgaagtctgtcccagaatattcagaggtggcttatcccgattattttggtcacattccgcctccattcaaagagcctattttagaaaggccttatggtgtacaaaggacaaaaattgctcaagatattgaaaggctaatacatcagagtgatatcatagatcgtgtggtatatgacttggataacccaaattacaccattccagaagagggagatattttgaaatttaactccaaatttgagtctgggaatctgcgcaaagtaattcaaattagaaaaaatgaatatgatcttattctgaactcagacataaacagcaatcattatcatcagtggttttactttgaagtcagtggaatgcgaccaggtgttgcttacaggtttaacatcattaactgtgaaaagtccaacagtcagtttaattatggtatgcaaccactcatgtattcggttcaggaagcattaaatgccagaccatggtggattcgtatggggactgacatttgttactataaaaatcatttctcaagaagttcagttgctgcaggtgggcaaaagggaaaatcctactatacaattacatttactgtcaattttccacataaagatgatgtttgctactttgcttatcactatccatatacgtattcaactttacagatgcatcttcaaaaattggaatcagcacacaatcctcagcaaatctattttcggaaagatgtgttatgtgaaaccctgtctggaaacagctgccccttggtgactataacagcaatgccagagtctaattattatgaacatatctgccatttcagaaatcgcccttacgttttcttgtctgctcgggtacatcctggagaaactaatgcaagttgggttatgaaaggaacgttggaatatctcatgagcaataaccccactgctcagagcttacgagaatcttatatttttaaaattgtccctatgttaaatccagatggtgtcatcaatggaaatcatcgctgttctttaagtggagaggatttgaataggcagtggcaaagtccaagtccggatttacatcctacaatttaccatgctaaggggctgttgcaatacttggctgcagtgaagcgtttacccttggtttattgtgattatcatggccattcccgaaagaagaatgtatttatgtatggttgcagcatcaaagagacagtgtggcataccaatgataatgcaacttcatgtgatgttgtggaggatacgggatacaggacattgcctaagatactgagccatatcgccccagcattttgcatgagcagctgtagcttcgtagtggaaaaatctaaagaatccacagcacgtgttgtagtttggagggaaataggagtacaaagaagttataccatggagagtactttatgtggctgtgatcagggaaaatacaagggtttacagattggtacccgagaactggaagagatgggagcaaaattttgtgttggtcttttacgtttgaaaagactgacctctccattggagtataatctgccttccagcctgcttgactttgaaaatgatttaattgaatcaagctgcaaagtaactagccctaccacttatgtcttggatgaagatgaacctcgattccttgaagaagttgattacagtgcagaaagtaatgatgagttagatattgagttggctgaaaatgtaggagattatgaaccttctgctcaagaagaagtactttctgactctgaattatcaagaacatacctaccttgagcccgctgccatctcttgttaactgcaaagaataaatgaaatatcttggtttttatttcccaggaagcttgagagaaatgagtttatacagagctgactcaaaaagacaaaaagtaacttgggccagtttggtttcaagataataaatgtgttattaattaatgataaaaaaaaaaaaaaaa

SEQ ID NO: 27897 - DNA, 3331 bp, Homo Sapiens
ggctagccgcgcctcgctccgccctggacgccgccggtcccggcgcggaggtgcggcggggagtgggagccggcccggctcagtctgatttacggctcgtctgaaaaccgcttcgctcccgcagcatcagcaccggaggcggcggctgcagcagcagcaacaagtcggagaagttgtcacattcaaccatttcctggaagcggcagctgagaaggaggttcaagggaaagcccggctccaggactttattgagaatctgttacagcgggtagaactggcggagaagcagcttgagtactatcagagccagcaggcctctggctttgtccgtgatctcagcgggcacgtgcttacagacatctcctcaaataggaagcccaaatgcctaagccgagggcacccgcattcggtatgtaaccaccctgatctcaagtcccatttccacccaaagggaaggaaccacctgaaaaaggccaaggatgacagagccagcatgcagcctgccaaggccattcacgaacaggctgagtcctcaagagacctctgcagacctccaaagaaaggggagctcctggggtttggccgcaaaggcaacatcaggcccaaaatggctaaaaaaaagccaacagccattgtgaacatcatctaaaagggtgggtggtgctggaccaatcatcgctgggctttggggaacgttgttccaggagccaacagtaatgtctttctggaaacattccatagtaagacacattggaaaagccaagggcataacacaggcaagcacctcaattaaccagagcttagcaaatgggaatcttagtgaaccagaattttattataacccccttttagaagcttgcaaattacagaaagaataaaaaaattaaatcaatcttaaagctctaacttctaaagtaactggcccagtctccagtaatcttggcatctgggcttctatgcagtggtcactaattttcaggaccaaggccacacaaaatgtcaggcctagggagaaaattcatctgtgcccactgctctccaaagtgcgaggcaaggaatggcagtgtaaagttctgttaatagcagtaaaatgaaaatatttgtgtttgtgtataaccttcccatcagctaatttgaaagcctccaaaataaggattcccattccccgagtattctggttaatcaagatttcaatttctgggttgctcaagggactcgttcagtcagacttcagttctcattccgacagggtgtctttcagttcgtttgtttgattgaggttttttggtggcctagatgcatgtttattcagattttggtacacctctgccgtcttctttggctgagtattctgcacccacagaccatgctgccagcctctatcttaatagctgcttctgtggatatggctggggagcgaagtaaaatcctcttttgattagcacccagcatgggctgggtggctaggtggttggaatgacagtggactgcacgcttggtgcatcgtgcatcgtgaccatcctggaagcactgcgggtgtcgccaagccctttcctaagacctgcttcccggccagtgtcagtggccctctctctctctgctatgggcatgactttctcttcgctggcttaacttttccactgggtggttcactttgcctcctgctgcttctgtaccctgttaaggcttcaggtatctttcaaccaagtatctggagtgttcactctatgttgcattctaaagtaatttctgaaataaacaatgcatgtaggagccagaatctgacactgtcttcccctccttccctccctaaaatggctttagtttccacaaagagctgttaagaatttcctgctgtatgattttcctcaagaatgaatttccatgttattttttccttaaatttagcaatatcatcaggtctcttgcagagtttacaagtgctgacattcttctgaaaacaggaataattttgtccacaaatatatacatatatacatatatataacacatacaaaatatatatgttaagtatattaataatttatttttaaatactcatggagaaagtgtgtgtttgtggtgggtggtttttaaactatatatgtttgttcatgtaaactgaattctcttatttaaaaaatcaaaactgtaacgtaattaacattggcagaattatgattgttactgcaataagcatcaaattagcagcgcattaaaaataggaaataaagcagttgcttaaaatgccagtcaattgaaaagtgtaacttatcattatacaaacattctgaacctaccataatgaaaatgctcttgaatcttcactttgactttcagtttatgggggggtagatcattcatgtgatatataagcagctatcaagtgggcaaaaacattgctgtgaatagcactgtttaggctaacattgtaaaaattgtaatgttataattattatttatttggagaattaacttccccctctaaagttatttattattgatgcttataccatgattgcaccttagccttttacatactaaaaacatgacttgttagttgtattgcatgctctttgtcctgtaatgtgtgtgcaatgacaacttgtttctgttttatttaaagtaactgacattttggattttcatctaacatagagggcatggcaactctctttgacagtggtaccccatgatcttcagaaagtaccataatgtcatcctactctacatttcacaagacgaattattttgagatttgtttattatattaaaatgtttttttacgttcccactaaattttgaccccatataaagaaatgtgttatgtatgttgtgcctccttagagacataaatttagtgtcaaaacatgggagatggcttactcagaagcatactccacttaacataccatggcctgagctaagtaccatgtcctgtttgtgtcttatttttaaatattttctttgtccacatgggccgttgaccttagagttaaggcggttgcttttttgaagaaatcaccaaagtttctgggaaactatgttcaaggttgaaatggagagtagatttaattttatttgtcttgtagggaagaaatcttcctttgaaccgcttttcttgctttttccctttttcccaaactaggttacaggttcttatctgcaaggttcaagttgcttagacattgttttccagtattctgcagggccagtcagttgtacagaagttggaatattctgttccagaattaaagaagtttttagattatgaaatattatgataataaagctatatttctgactaatgtgttgaaaaaaaaaaaaaaaa

SEQ ID NO: 27898 - DNA, 2183 bp, Homo Sapiens
agtcgtgccgggtgcggcgccagcagcggaggggcggcccggcgcccagcggagagccgctggctggaagaggaggcggtagacgcgaccacagaagatgtcgggacgaacgctcacggatcggatcgccgccgctcagtacagcgttacaggctctgctgtagcaagagcggtctgcaaagccactactcatgaagtaatgggccccaagaaaaagcacctggactatttgatccaggctaccaacgagaccaatgttaatattcctcagatggccgacactctctttgagcgggcaacaaacagtagctgggtggttgtgtttaaggctttagtgacaacacatcatctcatggtgcatggaaatgagagatttattcaatatttggcttctagaaatacactattcaatctcagcaattttttggacaaaagtggatcccatggttatgatatgtctaccttcataaggcgctatagtagatatttgaatgaaaaggctttttcttacagacagatggcctttgattttgccagggtgaagaaaggggccgatggtgtaatgaggacaatggctcccgaaaagctgctaaagagtatgccaatactacagggacaaattgatgcactgcttgaatttgatgtgcatccaaatgaactaacaaatggtgtcataaatgcagcatttatgcttcttttcaaagatcttatcaaactttttgcttgctacaatgatggtgttattaacttactcgaaaagttttttgaaatgaagaaaggacaatgtaaagatgctctagaaatttacaaacgatttctaactagaatgacacgagtgtctgaatttctcaaggttgcagaggctcccagcagtcttatggagacgcttgaacagcatctaaatacattagaaggaaagaaacctggaaacaaatctggtgctccctctccattaagtaagtcttctccagccacaactgttacgtctcctaattctacaccagctaaaactattgacacatccccaccggttgatttatttgcaactgcatctgcggctgtcccagtcagcacttctaaaccatctagtgatctcctggacctccagccagacttttcctctggaggggcagcagcagccgcagcaccagcaccaccaccacctgctggaggagccactgcatggggaggatttgggggttctttcatggcgccttccccatctccagtgactccagctcagaataacctgctacagcccaattttgaggcagcttttgggacaacgccttcaacttccagcagcagctcctttgatccatcagtgtttgatggtctaggtgatcttttgatgccaaccatggcaccagctgggcagcctgcacctgtctcaatggtaccacccagtcctgcaatggcagccagcaaagcccttggaagtgatcttgattcatctcttgccagcttagtaggcaatcttggaatttctggtaccacaacaaaaaagggagatcttcagtggaatgctggagagaaaaagttgactggtggagccaactggcagcctaaagtagctccagcaacctggtcagcaggcgttccaccaagtgcacctttgcaaggagctgtacctccaaccagttcagttcctcctgttgccggggccccatcggttggacaacctggagcaggatttggaatgcctcctgctgggacaggcatgcccatgatgcctcagcagccggtcatgtttgcacagcccatgatgaggcccccctttggagctgccgctgtacctggcacgcagctttctccaagccctacacctgccagtcagagtcccaagaaacctccagcaaaggacccattagcggatcttaacatcaaggatttcttgtaaacaatttaagctgcaatatttgtgactgaataggaaaataaatgagtttggagacttcaaataagattgatgctgagtttcaaagggagccaccagtaccaaacccaatacttactcataacttctcttccaaaatgtgtaacacagccgtgaaagtgaacattaggaatatgtactaccttagctgttatccctactcttgaaattgtagtgtatttggattatttgtgtattgtacgatgtaaacaatgaatggatgttactgataaaaaaaaaaaaaaaa

SEQ ID NO: 27899 - DNA, 3535 bp, Homo Sapiens
gcagtacacgggaggcttttaattccattgtggagaggacggcgttatttttattaactggaggcgacggcggctgcggcggcggcgggacccgcctcctccggggtatgaaaatcggcagtgggttcctgagtggcggcggaggtaccggcagtagcggtggtagcggctccggcggcggtggtagtggcggcggcggcggcggcggcagcagcggcaggagggcagagatggaacccacctttccccagggtatggttatgttcaaccaccgtcttcccccggtcaccagcttcacccggccggcggggtcggccgcccctcccccgcaatgcgtgttatcctcctctacctccgcagccccggccgctgagcccccccctccgccagccccggacatgactttcaagaaggagccggcggcgtcagccgcggccttcccctcgcagaggacctcctgggggttcttgcagtctttggttagcatcaaacaggagaaacccgcggatcctgaggagcagcagtcccaccaccaccatcaccaccaccactatggggggctgttcgctggagctgaagagaggtctccaggcctaggaggcggtgaaggggggagtcacggcgtcatccaggacctcagtattctccaccagcatgtccagcagcaaccagcccagcaccaccgtgacgtattactcagcagcagtagcaggactgatgaccaccatggcactgaggagccaaagcaggacactaatgtcaaaaaggcaaaaaggccaaagccagaatctcagggaatcaaagccaagaggaagccaagtgcatcttccaaaccttctttggttggagatggagaaggtgccatcctctccccaagtcagaaacctcatatctgtgatcactgtagtgctgctttccgaagctcctatcacctgcggagacatgtcctcattcatacaggagaaagacctttccagtgcagccagtgtagtatgggtttcattcagaaatacctactacagagacatgagaaaattcatagtagagagaagccatttggatgtgatcagtgcagcatgaagtttattcagaagtaccatatggagagacacaagaggacacatagtggagaaaagccatataagtgtgacacttgccaacagtatttttcaaggactgatagattgttgaagcacaggcgcacatgtggtgaagtcatagttaaaggagccactagtgcagaacctgggtcatcaaaccataccaatatgggtaatctggctgtgttgtctcagggaaatacaagttcttcaaggagaaaaacaaagtcaaaaagcatagctattgaaaataaggaacagaagaccggtaaaacaaatgaatcacaaatttcaaataatataaacatgcagagttactcagtagaaatgcctaccgtgtcttccagtggaggcataattggcactggaatagatgaactgcagaagagggtgccaaaattgatctttaagaaaggaagcagaaagaatacagataaaaactaccttaactttgtgtcaccattaccagacatagtaggacagaaatccttgtctggaaaaccaagtggctcacttggcatagtatcaaataatagtgtggagaccattggtcttctccaaagtacaagtggcaaacaaggtcagataagtagtaattatgatgatgccatgcagttttcaaagaaaagaagatatttaccaactgccagcagcaacagtgccttttctataaacgtaggacacatggtctcccaacagtctgtcattcagtctgcaggtgtcagtgttttggacaatgaggcaccattgtcacttattgactcctcagctctaaatgctgaaattaaatcttgtcatgacaagtctggaattcctgatgaggttttacaaagtattttggatcaatactccaacaaatcagaaagccagaaagaggatcctttcaatattgcagaaccacgagtggatttacacacctcaggagaacactcagaattggttcaagaagaaaatttgagcccaggcacccaaacaccttcaaatgataaagcaagtatgttgcaagaatactccaaatacctccaacaggcttttgaaaaatccactaatgcaagttttactcttggacacggtttccaatttgtcagtttgtcttcacctctccacaaccacactttgtttccagaaaaacaaatatacactacgtctcctttggagtgtggtttcggccaatctgttacctcagtgttgccatcttcattgccaaagcctccttttgggatgttgtttggatctcagccaggtctttatttgtctgctttggatgctacacatcagcagttgacaccttcccaggagctggatgatctgatagattctcagaagaacttagagacttcatcagccttccagtcctcatctcagaaattgactagccagaaggaacagaaaaacttagagtcttcaacaggctttcagattccatctcaggagttagctagccagatagatcctcagaaagacatagagcctagaacaacgtatcagattgagaactttgcacaagcgtttggttctcagtttaagtcgggcagcagggtgccaatgacctttatcactaactctaatggagaagtggaccatagagtaaggacttcagtgtcagatttctcagggtatacaaatatgatgtctgatgtaagtgagccatgtagtacaagagtaaagacacccaccagccagagttacaggtaaggtcccaaaagtggccaggctggaggtcttctaatgtaattttgttttattttgagaacactgccattggaatgtttctacacgatcctattaagaataatgtgatgccctttcaatgcaacttttcatatttagtttattttgttagcgtgattttagctctgtttgtattatgatttttaatcaaaatcaatagattaaaaatagtttgacattcaaagtgacaatgtttagcaatcaaatttacatgtatagatcgtcagggaatagcccaaatgttttaaacgcaaaaaaaaagacaaaaaaaaaccaaaaaaaaaaaacctacaaaaaaaactttgttgctaggattaaggttattctaattgctttactctcaggaaagtgtaataacgcatgggaattctgtacgttatcactgtaatggaatatccaatttacagatagtatgatatacatttcatcatttaagtaagggatcgaaaacatttcaaattgctctatctgggctgatagacatttcgtcatttaagtaagggatcgaagacatttcaaattgctatctccatctgggctgatccaaaattctgagattgttggctacctatattttgttgcagcttttaaatgtactctgaacttccaaaccacattcattccagcctggtagaacaaatattcttggatctttgatcaaagcctggaatgatagctttaataaaagaaaaaaaaaaaaaaaa

SEQ ID NO: 27900 - DNA, 4221 bp, Homo Sapiens
tagtctctgactcgctcgggcagaggccgaggaagccggttccggggacgggcaacagggactcagggaccagaaggcggctgcaggacgcgaccgagcaggaccccaggcccgggaacgacgtcgcgagcgctgagactgccgggcctcccagcccatctggcattcgagcgcaggaccgggcgccccggcaccgccgcgcgccacccgctaggatgccggtggccccagcgccctcagccgacggaggagccctttttcaacgccctcgctggagtctggcctgcacgccttgctgaatgaagccggaacctcagccccgcttccctttgaaatgaatgttcctggggcgccctctcgtggattttggagctaatcgtctgtgaatgccaagtgatggcaactgccctcccgccgcgtctccagccggtgcgggggaacgagaccctgcgggagcattaccagtacgtggggaagttggcgggcaggctgaaggaggcctccgagggcagcacgctcaccaccgtgctcttcttggtcatctgcagcttcatcgtcttggagaacctgatggttttgattgccatctggaaaaacaataaatttcacaaccgcatgtactttttcattggcaacctggctctctgcgacctgctggccggcatcgcttacaaggtcaacattctgatgtctggcaagaagacgttcagcctgtctcccacggtctggttcctcagggagggcagtatgttcgtggcccttggggcgtccacctgcagcttactggccatcgccatcgagcggcacttgacaatgatcaaaatgaggccttacgacgccaacaagaggcaccgcgtcttcctcctgatcgggatgtgctggctcattgccttcacgctgggcgccctgcccattctgggctggaactgcctgcacaatctccctgactgctctaccatcctgcccctctactccaagaagtacattgccttctgcatcagcatcttcacggccatcctggtgaccatcgtgatcctctacgcacgcatctacttcctggtgaagtccagcagccgtaaggtggccaaccacaacaactcggagcggtccatggcactgctgcggaccgtggtgattgtggtgagcgtgttcatcgcctgctggtccccactcttcatcctcttcctcattgatgtggcctgcagggtgcaggcgtgccccatcctcttcaaggctcagtggttcatcgtgttggctgtgctcaactccgccatgaacccggtcatctacacgctggccagcaaggagatgcggcgggccttcttccgtctggtctgcaactgcctggtcaggggacggggggcccgcgcctcacccatccagcctgcgctcgacccaagcagaagtaaatcaagcagcagcaacaatagcagccactctccgaaggtcaaggaagacctgccccacacagccccctcatcctgcatcatggacaagaacgcagcacttcagaatgggatcttctgcaactgatcgtctccatgcgccctgctctgcggctgtgttcttatttattgcatgcgtcgcttccacaggggcccctcaagagctgtgactcgggagagctaccttactttgaccaacagcctgcccagtgtggatgtctcttacagagggggcccaaggaatcaccaccccgcttcagtgtaaacaacgtgccttgtccactttgggctccagagtctttcagatgtactaagctgctgacatcatccactgccttctgctgcatcctagacaccctccctgttgttcacagagagggaaggtcgtgggccacacaatgctgtgtgaccctctccgtgtgcctctgaatggtgttttgatgattttacactacatttcctgtgcgtagaatggatgcttgtatattcgtacacctctatgttacacagaatttgtgttgcaggtgtttgccatgtggtacctacatagaatctccatacaacacacaggtaacaggttatacaagtggattcagactgaacccccagtacaaggacattgttttgaactaggtggacatgccatccctggtctccttagactgacatgattctcatgttaaccaagttttaaaagttcaaattccccaaaaaggcttgtccaaggctggccccagatgtgtgggtctgacccacaccagccctgtgtcctgtcctttcagtcatttgtccctgcgtaattttaatcgtattccaaagcccaattatgtgatggttttcaggtttctgcaaattacagaagagccagccaagatcacccaggagcttgtgcccccagatgggccaaagaaagagcctatgaaggagaagcagaagcagacggctggcctggctcaccttcccacgccagtggggcaggggtctgcttcaggaaatggaagctgtccaggaaatgagcagagattcacaagacagcactttgattctatgttgagtttgtttctatattagaaaagcagcaagtcagtaatcccccgtggcatcacagctaagtagctgtggccaccggcagtttcacagcatcctgaaagctggcactgatcgtgactatcagtgaaagaagtttaattttcaggttagaaaatgtgatctggcagtttatgcattcttcagagtaatgtaataatacctatgtgatgctgtaattttacttttcaacataagttgaacccgtagcagtctgtttaccttgtaaagggattacttagaagacatttttgtacatgctcttccccaaggattgtacgtattatacaaatagatggaaagaaaagtgaacacgtttgtagaactttcataagcacacagttgctgtgttgagttctctttaaaaacaaggacaaaaccaaccagcgttcaaaggaacctcccatcagagtcccctaaagtattttaggttcagtgagcatttgcctgaataaaacctaaaagagtagtcttaacacattactaactttttctaagagaaattgattcctgttttgtcatctgatgcaatttgctcttataaagagacattttcataggttcagagtaactcacctccatgggctgaccaaaggcttttctaatttttgttactgatgagatgaaacctatttgtaaggagatcttccccaggagcatttctgttgccttcttgacatcaatgaaaagtagcatattctcttatgaaatagcatgagaaaacacagggcatttctaggacagtaaaacgttaaagtactggattaagaaaacaacaacaggctgggcgcagtggctcacacctgtaatcccagcactttgggaggctgaggcgggtggatcacctgaggtcaggagtttgtgaccagcctggccaacatagtgaaatcctgtttctactaaaaatacaaaaattagctggatgcgatagcacgtgcctgtagtcccagctactcgggaggctgaggctggagagttgctcaaacccgggaggcggagattgcagtgagccaagatcgcaccgctgcactccagcctgggtgacagagcgaccctctgtctcaaaaaataataataataataaataaaacaacaacaaaatgcatcagagagccaaaacattcagtattgcattttcacataggtgatgaaatgactttggaactttatctgtgttatagttatgagttgctttgggagacttggagctctctgtagctattgttcataacactttgctccataaccctgatgtccgcagtatctaagtatctcagccttcatccattaactctactagggagcccacagccaccatttccactaggaggtatcaatatttgtggtatgacataaggctcccttgaaataacaagacttttgagcaatctgaattaaaaatacatcaaaaaagtaatagcgctcatttgctaaatgcaaaaaataatcacctttgataccaatgtgcaccaatatgcctaactagctagccagctggagataatttaccagggaatgtttcaaagccctaaccttgaagtttggaaacaggtggtcttctatgctgcagagaaactatgcattaggtctcttttcaattagaaacctttactatttccaatgtatgtttgttaaaaataataataataaaaccaaaagcctttgtggaaacccaaaaaaaaaaaaaaaa

SEQ ID NO: 27901 - DNA, 2697 bp, Homo Sapiens
accgcctccttgaagctgccgctgtcgctgctgctcgttcgagtcgcagatccttgccagcacattacagaatatttttgttgaaccttcttgagaattcagagaaactgctgagtgaccactgaacgaaaagatctaatcttaaggcttacgcgtgttccatccaccacatcagaacaatgtcgtatgtttttgtaaatgattcttctcagactaacgtgcccttgctgcaagcctgtattgatggggactttaattattccaagcggcttttggaaagtggctttgacccaaatattcgtgacagcaggggcagaacaggccttcaccttgcagcagctcgagggaatgtagacatctgccagttactgcataaattcggtgccgatcttctggccacagattatcaaggaaacacagctcttcacctctgtggccatgtggatactatccaatttttggtttccaatggactcaaaattgatatttgcaatcatcaaggtgctacccctttagttctggcaaagcgcagaggagtaaataaagatgtcatccgattgctggaatctttggaagaacaggaggtgaaaggatttaacagaggaacccactcgaaactggagaccatgcaaacagctgagagtgaaagtgccatggaaagccattcactcctcaatcccaacctgcagcaaggtgaaggagtcctctccagcttccgaaccacgtggcaggagtttgtggaggatctgggcttctggagagtattgctgttgatcttcgtcattgctttgctgtctcttggcattgcttattatgtgagtggggtgctacccttcgtggaaaaccagcctgaactggtgcattaaaggagctcatggaagatgaggcaattaattgcctgtttcctggcttccaatgtttgttctcagtttctcagaatttttcttagcgcaaagcagtgagggcagtacatgttctttttgcatttttaattattgtaatccttttagataatgatgtgttcatttgaactaactacatactatgatcaagtatattgcatcctaacgctacctctgactcaacctgactttgtaggaaagcctacacgtagccttgtttgataaaaacacggaagtgactagagaatggaagataaaggaagaagctaggaagtccttgctatcaaaactttatcctaatataggaccaattgaagtattcaaaaagaaaaacagtatcttatatgattagtttttgttggtggttttgttttcatttatttttgcaagagccactttttatttactttctctagggataagagataaaacttgaagtacttttttcaaatcttgtgtgcaaattagtattgttagcatctatttggcttattttagtatttttaagtctagtcacaaaccaaacaaaacttttgaaaatgagctatattttgttcaaagataattgatttgatcttatatttatttgtttttaggataatttttgatctttttgtaaactgctttgcttgttaatatctgtgaaaaataaatgagttcattttgttcactttccaattttcccgagtatcctagtcatcaaagataacagttcatcagaattacagtcagaaaatcctttttctactgaatagttagcagggaaaaataattctgatatttaactgtcataattctgtagtgctattatagtgaaaaactcagttctataagctagctgtgttgtcacagttttatcatagttcataattatttcacgtgcaatcctatttggaggccctgttagacttttaacaatcccatccatatctgtaattctctgatggcaagaatggatggagcatttctgagttaacagtgctggacagtatcgtactgggtgtcataaactctttatgaatggtaatattatgtaaattgaaatctggccctcaaactatattgcagctttcagcagtatgtttgaaggcctcttttgttaatgattctgtaatgtatgaattatgttcttgagtggttaaaaaagaatatgaaggcttgataattatttattgggtaaagtcaggaaattgtagtgaaagaactaatggttttgttttttggaataaaggcacctaagctattgctaattgaattgctgctagaattagaaattatgctttagaatagaattggtatttctgtgattctttttgcttcttggtattttctcttgtatctatgtatctagtattgaggcttgctctttcatgtggctttatcctctctttaatagctgttgtaaaattcctgagtaactggctgcttcaggatcagcttgcagagtcttgcttttaggttagatacaaacaaagtaaatcatagttggtgtaaatccagcaaaaaacagctggctttggaatggagaacactacaattcaaatttgaagtatattcagaagaaaactttggaattagctttacatttgtttgtaaatctaaacaaatatgcaaaattggtcaaaatgtaagtatatagcatttttaaagattaatggttccttttatgtgctgatttctttgtattctgttctctgcattcatcattcaggaataccaccaataaatgtatttatatatcccttaaaaaaaaaaaaaaaaaaaaaaaaaaaaaaaaagaaaaaaaaaaaaaaaa

SEQ ID NO: 27902 - DNA, 3655 bp, Homo Sapiens
gagggagggagctgcttccccgcctgccgcgccaccagtccgaccctcggtcccgccgtgtgagcagctggtggagtggagctcagcgcggacgccggagctgcggccgccccctctgcaggtgcctgtgaggaggcgcccgggccgcaaccgctttccgagatccccagtcgcgcactcgctccccgcgctcctgaggggccgcccggccggaggaggccgtcgcggggctcggcgttcagcatgaaccgcagccaccggcacggggcgggcagcggctgcctgggcactatggaggtgaagagcaagtttggagctgaatttcgtcggttttcgctggaaagatcaaaacctggaaaatttgaggagttttatggattactacaacatgttcataagatccccaatgttgacgttttggtaggctatgcagacatccatggagacttactacctataaataatgatgataattatcacaaagctgtttcaacggccaatccactgcttaggatatttatacaaaagaaggaagaagcagactacagtgcctttggtacagacacgctaataaagaagaagaatgttttaaccaacgtattgcgtcctgacaaccatagaaaaaagccacatatagtcattagtatgccccaagactttagacctgtgtcttctattatagacgtggatattctcccagaaacgcatcgtagggtacgtctttacaaatacggcacggagaaacccctaggattctacatccgggatggctccagtgtcagggtaacaccacatggcttagaaaaggttccagggatctttatatccaggcttgtcccaggaggtctggctcaaagtacaggactattagctgttaatgatgaagttttagaagttaatggcatagaagtttcagggaagagccttgatcaagtaacagacatgatgattgcaaatagccgtaacctcatcataacagtgagaccggcaaaccagaggaataatgttgtgaggaacagtcggacttctggcagttccggtcagtctactgataacagccttcttggctacccacagcagattgaaccaagctttgagccagaggatgaagacagcgaagaagatgacattatcattgaagacaatggagtgccacagcagattccaaaagctgttcctaatactgagagcctggagtcattaacacagatagagttaagctttgagtctggacagaatggctttattccctctaatgaagtgagcttagcagccatagcaagcagctcaaacacggaatttgaaacacatgctccagatcaaaaactcttagaagaagatggaacaatcataacattatgaaaccgtggtttgaatgttttcagagtgaggatgccatgaggacttgtacatttggctagtttaaaagcatatatacctctgaccagtgacgtggaataggcatgagacgagtaacgttgcaagcttacaatattattaaagtagtagtttgataattgttaatataaactttggtggatcagaggtgaatttaagtccaaaacaaaggggctttgctgatgaagttacgtgcttttgctgttttgtctgtggagaatcagatgttaaagcacattcttggaactatgtgagaagactagatcatttctgttggaagtggttgcatatttaacctgctgtgcagagcccagttaatttttcctttaactgtatttttaaaattctaatgtgaagtctgattctctcttgtggtacattggggacctcagctcttaaaggtctcatgttcccaatattttattttgattttttttttttttttttagtgactgggtctcactctgttgcccacactggaatgcagtgaatcatgattgtatcactgcactccagcttgggtaacagagtgagaccgtttctaaaaattaaaaaaaaaaaaaaaaggcagctggatgcagtggctagcacctgtaatcccagctacttgggaggctgatccgcccatctcctcccaaagtgctggattgcaggcatgagcgcctagccaggaagctatcttttcttgagttatgaaactttgcaacagttgttcaaattggtgtttgtccttcctatagctttcatattttcaaattaattctgtatggctatataatttatgttttaaaaggcaattctcttgactttggaaatatggaagtctctcctttaacctattcttgttcccattcccagtctcatttgaaatcattccttttattgttagtgtgtgtatttttgttggtgtgcttttaatgcatccaagtatgcatcattttggataaaaaatacatccaaattaagatgttttaacacataggacaaacttgtgcactttttatgccaaaaaaaaaaaaattgggttttccttcatgggatttctagaaacactgcctacactttatgaaaactacatagtattcacctgtgacaggtagagtttgtcactattaattttatgaggctatttattactttccagtgcatccacttagaacaagctaagagtaaggctgctaactttaattccttgcctgattttattgtacagtgcacaagcacaatggtatgcttgtatatagaaactaaaaatactatgaagtacataagttccctatggcttatggagagttatttattaattaactttatggtagggctagtatgaatacctttttaacaattgtgtgctattacaacaatgaagattcaaatgactccgctttgaaggatgttttctctatatggtaaaatatatatgaagaagtcttgattacgtgaagatcacttgactcagaatacttcaatgtattttgttcacattaccactaagcatattatcagtaaactattaactgactgcacattatgtaatacgttgtactttttgttgaattcaccgaagttcttccatttatatactatttttaatggcattccggctttaacattctgtgagtcttataaatttgactcttgaatggcaaaataatgttagtatgtagaaggttaactttcatttataatataagtggtgcaggggttcaacattttaagtaaaaatatttttacacactacctctctttttttttttttaaagttttaacatcagaacttttgggggaaaaactacttcagggcttgactttttgtacaaattttaactgtaaaatacagatttatcttgtacgcattcatggaaatggaaatcaaagctgctattgctttttattttaattatcctgttaagggtatctatcaatggtattttcaagtagatctctgtttcttaaattattggtgaaataattgattactagatatattgtaaaaccaatagatcctggttatacgataaaatatcagctcattggtaggctgaatcaattatttcaagtgcaccttattaacaaaagtatcagtggatccaacataaaattttatagtactaaatgtcaagcctaactgtgaattttgttctgtatcttaagtaaatttatgataatgttctcgagctatcaacaaaatatatgtacttttgtgagctatgaattttctaattaaattttacatgctataaaaaaaaaaaaaaaa

SEQ ID NO: 27903 - DNA, 3460 bp, Homo Sapiens
gtttttctctctgctttctcaacagccagatctgccagtgagcctcaggctttaggaactgaagagtgtttctgaaagatctatccagcactccgatggccagcaacaacaccgccagcatagcacaagccaggaagctggtagagcagcttaagatggaagccaatatcgacaggataaaggtgtccaaggcagctgcagatttgatggcctactgtgaagcacatgccaaggaagaccccctcctgacccctgttccggcttcagaaaacccgtttagggagaagaagtttttctgtgccatcctttaagtctttgagaggggcctgaagagcctccgggctcctgggacattgatgtagagtttttagtgaagtgggcacctttctagtccacggcatttgaagagagcgaggagaaccattctggaaactctaggctatgcatgtttaaagatctggtcccctttatgagaatgcaagccgatccacatcctgacttaagagatctgattctgacgaactgcctggaggaggggaatatataaaaataaaattggtgtcacttcttttctgctatcccccagccccccccccaaaatcctcatgtttctgcttcatattttgaaaaataacaattaaaacagacagctgtactgaggtaagatatgtgtgaccttcttggaatgaatattgtctttagaataccctttgataagctgagctgtcccgtgtagatgcaattcggtttaatggcattgatgtatagtcactgtgcctttctttttctttcttccttctcctctacccctccttccacccctccccattagagtagtgtggagataaggctggactggtctatcagattgaactccaagaatgatcacacaaaatgtttagggagatgttccccgtggtgtatcctcatggtaacaacgacaaaaaatgccggttgtctttgttctcttttcactattcctaacatgtgtacatgatagctttgattctgcaagtaaaagtaaatcctgtgttgtgactggtgctttcatatatttgtgacaatttttgagtaatattgcatgaaaatgtccctatgttacatccattcagaagttttgttgttttactctaaagctgggaaaggaaatgagagggaaaagaccccggagagggaagaaaatctcagtattttgaaaattgagattacttcagagccttagccacacctaaaatacctcctagttaatagtggtataaatgcctcttcaatacgttttccagaatccaaagcattttggtttatccaggacccagggcagcacagctgtcaccaagcaggagagttaaggattcaccatgagctgggaaatgcttttgccatgagtatgagcaaattccctctttccctgaatcatggacattctagattaaaagaacatttttttgtgctcttaacaagataaccatggccctcctttgttcaagtatcagaagaaataaacccacagctccagagaaggtgaccattctcagaactccagctattcactctccagggagaaggacctcaaatcgccactctttgggcggcaggtgcggtccccacggccggctctacgaggaagagttctggctcttttgtccactgagatggtcttggtttttcacttaacaaattttttaatggaatctttgtttttgttctccatcttgtttgttagagtctctcggcctttatttacaaattccttgcaactagagcgctccttccccaagatatggtagtgagagtaatttttcattgtagctgtagtctccatcagtaacagcaggccctggaagacttgatcacctttttctgtgtcattttcagtcaaagagggcctctcttacatcttgtttgctttcaaatccccaaatatcatctccatctccgaattaattttattgtctctttcctctctattcgctttctcctgtttttttttttaaaaaaaagcatgaaaaagggagagaaaaagtttgatatgccaaggacagattttgaaacagacttggtaaatgttttccttagctccttcatgggcatgctggtgaaagaataaatacatccaattaaagctcatgctggggtcggggagaagaggatactgaaacatttgtgaaatgtatgaatgcacttctgtaaccagatacttctgttcttctgttcaaattgtggggtttttgttacagttaggacgcccatgaagatttaggggtgaaaaaaacagcagagtatttattaaactacagcattgtacaattagcttagtaacactatggaataagctaaaacatatcacagtttttacatgggccaaaacatgaattgagtatgtggtcacatgaaaacacggatgaatgaataaaacactctttggtggtgactgaggcatcattagaaggcccagacgatttccactattcacagcatttccttttctcagaaggactctttatatttccatgtaaatctagatctttggagcaattaagatggaattacaatttctagggagcattttaaggaaaatgttttggctttttcataattttatgtcttacagtatggaattataatacgaaaatctttatatgagttttggcttcttggtatttgtacttattcaggggaaaaagtctttcgattacttatgcctctatagagcttaatttcttgagaaattcaacagtcattttcaccagcataattttatcttaaggaataactaataggaaaagtcagcttaattatttaaggccctagtttctacatataatatattcgatagaaatgaaaatctgccgtggaattaactaataagtagtaacaataaacttcatatttagaatgcaaagtctataaagaataattttacatgatcctcaatatcaactccagtttaaaaagtgttatttttaaaacatttgaaaccaagtactgtttaatttcaatcagaagatgcaaatacatactttgatctatgtttgattttgctaataatatttgaaggagattgcctaccaaggacaaaacaataaatttaaaaatcaaacgatttctccatacgctcatagtcacatatggaattttgagaaaataaagcatgctgtctttaggaatttttatacttctttgtctttcttccttaatatttgcttctagctgctcttggcaatgatgaattgttatgtatgcattaatgttttgcagcccaaaagttgttcacatttttcctatataagatctgtggagtgtgtgtttcaaagagagaactacagaaatgttaaagcaggaaaacctgaatgtgatgtgcacattttcatcccacatggacaatgtatgtgttttaataaatggaattttcagattcaaaaaaaaaaaaaaaaaaaaaaaaaacaaaaaaaaaaaaaaa

SEQ ID NO: 27904 - DNA, 2746 bp, Homo Sapiens
ggctccgacttggactccctgctccgctgctgccgcttcggccccgcacgcagccagccgcccgccgcccgcccggcccagctcccgccgcggccccttgccgcggtccctctcctggtcccctcccggttggtccgggggtgcgcagggggcagggcgggcgcccaggggaagctcgagggacgcgcgcgcgaaggctcctttgtggacttcacggccgccaacatctgggcgcagcgcgggccaccgctggccgtctcgccgccgcgtcgccttggggacccgagggggctcagccccaaggacggagacttcgattcgggaccagccccccgggatgcggtagcggccgctgtgcggatgccgcgaagcagctgcagccgccgccgcgcagatccacgctggctccgtgcgccatggtcacccacagcaagtttcccgccgccgggatgagccgccccctggacaccagcctgcgcctcaagaccttcagctccaagagcgagtaccagctggtggtgaacgcagtgcgcaagctgcaggagagcggcttctactggagcgcagtgaccggcggcgaggcgaacctgctgctcagtgccgagcccgccggcacctttctgatccgcgacagctcggaccagcgccacttcttcacgctcagcgtcaagacccagtctgggaccaagaacctgcgcatccagtgtgaggggggcagcttctctctgcagagcgatccccggagcacgcagcccgtgccccgcttcgactgcgtgctcaagctggtgcaccactacatgccgccccctggagccccctccttcccctcgccacctactgaaccctcctccgaggtgcccgagcagccgtctgcccagccactccctgggagtccccccagaagagcctattacatctactccgggggcgagaagatccccctggtgttgagccggcccctctcctccaacgtggccactcttcagcatctctgtcggaagaccgtcaacggccacctggactcctatgagaaagtcacccagctgccggggcccattcgggagttcctggaccagtacgatgccccgctttaaggggtaaagggcgcaaagggcatgggtcgggagaggggacgcaggcccctctcctccgtggcacatggcacaagcacaagaagccaaccaggagagagtcctgtagctctggggggaaagagggcggacaggcccctccctctgccctctccctgcagaatgtggcaggcggacctggaatgtgttggagggaagggggagtaccacctgagtctccagcttctccggaggagccagctgtcctggtgggacgatagcaaccacaagtggattctccttcaattcctcagcttcccctctgcctccaaacaggggacacttcgggaatgctgaactaatgagaactgccagggaatcttcaaactttccaacggaacttgtttgctctttgatttggtttaaacctgagctggttgtggagcctgggaaaggtggaagagagagaggtcctgagggccccagggctgcgggctggcgaaggaaatggtcacaccccccgcccaccccaggcgaggatcctggtgacatgctcctctccctggctccggggagaagggcttggggtgacctgaagggaaccatcctggtgccccacatcctctcctccgggacagtcaccgaaaacacaggttccaaagtctacctggtgcctgagagcccagggcccttcctccgttttaagggggaagcaacatttggaggggacggatgggctggtcagctggtctccttttcctactcatactataccttcctgtacctgggtggatggagcgggaggatggaggagacgggacatctttcacctcaggctcctggtagagaagacaggggattctactctgtgcctcctgactatgtctggctaagagattcgccttaaatgctccctgtcccatggagagggacccagcataggaaagccacatactcagcctggatgggtggagaggctgagggactcactggagggcaccaagccagcccacagccagggaagtggggagggggggcggaaacccatgcctcccagctgagcactgggaatgtcagcccagtaagtattggccagtcaggcgcctcgtggtcagagcagagccaccaggtcccactgccccgagccctgcacagccctccctcctgcctgggtgggggaggctggaggtcattggagaggctggactgctgccaccccgggtgctcccgctctgccatagcactgatcagtgacaatttacaggaatgtagcagcgatggaattacctggaacagttttttgtttttgtttttgtttttgtttttgtgggggggggcaactaaacaaacacaaagtattctgtgtcaggtattgggctggacagggcagttgtgtgttggggtggtttttttctctatttttttgtttgtttcttgttttttaataatgtttacaatctgcctcaatcactctgtcttttataaagattccacctccagtcctctctcctcccccctactcaggcccttgaggctattaggagatgcttgaagaactcaacaaaatcccaatccaagtcaaactttgcacatatttatatttatattcagaaaagaaacatttcagtaatttataataaagagcactattttttaatgaaaaaaaaaaaaaaaaa

SEQ ID NO: 27905 - DNA, 4040 bp, Homo Sapiens
aactggagccggaaaccggtggaggtggtgtccgcccgcagaggagcttgcctggtctcggtctgagcgtcgcccagcgatttgccaccgcacgcacgccggatcccgggctttaccgcccgcctttccaggccccgccccgcctaaagtcccatggccgaggcagcgctagtgaatacgccgcagattcccatggtaacagaagagtttgtgaaaccatcacagggccatgtgacctttgaggatattgctgtgtacttctcccaggaggagtggggcctccttgatgaagctcaaaggtgcctgtatcatgatgtgatgctggagaacttttcgcttatggcctcagtaggttgtttgcatggaatagaggctgaggaggccccttctgagcagactctttctgcgcaaggagtgtcacaggccaggactccaaagctaggtccttccatcccaaatgctcattcttgtgagatgtgtatcctggtcatgaaagacattttgtacctcagtgagcatcaggggacacttccctggcagaaaccttatacgtctgtggccagtgggaaatggttttcatttggttctaacctgcaacagcaccagaaccaggacagtggagagaaacacatcagaaaggaggagagcagtgccttgcttctgaatagctgcaaaattcctctgtcagacaatcttttcccatgcaaagatgttgagaaggattttccaaccatcctgggccttctccaacaccagaccacccacagcagacaagagtatgcacatagaagcagggagacctttcaacaaagacgttacaaatgtgagcaagttttcaatgagaaagttcatgttactgagcatcagagagtccacactggagaaaaagcttataagcgtagggaatatgggaaatccttgaactctaaatacttatttgttgaacaccagagaacccataatgcagaaaagccttatgtgtgcaatatatgtgggaaatcattcctccataaacaaacactcgttgggcaccagcagagaattcacactagagaaaggtcttatgtgtgcatcgaatgtgggaaatccttgagctccaaatactcacttgtggaacaccagagaacccataatggagaaaagccttatgtgtgcaatgtatgtgggaaatcattccgccacaaacaaacatttgttggccatcagcagagaatccacactggagagaggccttatgtgtgtatggaatgtgggaaatcttttattcattcctatgaccgcattcgacaccagagagttcacactggagaaggggcttatcagtgcagtgaatgtgggaaatccttcatatacaaacagtcacttcttgatcaccatagaatccacacgggagaaaggccttatgagtgcaaagaatgtgggaaggccttcattcacaaaaaaagacttcttgagcaccagagaattcatactggagaaaagccttatgtgtgcatcatatgtgggaaatcatttatccgctcgtctgactacatgcgacaccagagaattcacactggagaaagggcttatgaatgcagtgactgtgggaaagccttcatctccaaacaaacacttcttaagcatcacaaaatccacactagagaaaggccttatgaatgcagtgaatgtggaaaaggcttctaccttgaggttaaacttcttcagcaccaaagaatccatactagagaacaactttgtgagtgcaatgaatgtggaaaagtcttcagccaccaaaaaagacttcttgagcaccagaaagttcacactggcgaaaagccctgtgagtgcagtgaatgtgggaaatgctttagacaccgcaccagcctcattcaacaccagaaagttcacagtggagagaggccttataactgcactgcatgtgagaaggcctttatctataaaaacaaacttgttgagcatcagcgaatccacaccggagaaaagccgtatgaatgtggtaaatgtgggaaagccttcaacaaaagatattcccttgtcaggcaccagaaggtacatataacagaagagccctagcaattgttgggatgtgtaattgtcttattcactgtaggacaccagagagctgatttttcaagggatccaacagacagaaattcaccctcatacatctgcatatcactagttgaaagattcactacaaggtccaagtacttgggaagctttctagagattacttgtactttctaatctgcccagtgttacaacagacactaccatgtggcatatcctcaccgttttcatcagtcactcacatgtgctcaaggaatgcagaccactgtgcttaccaaattctgaagggaataatataataaaagcctgttgagggtcctcttccatcttgctgaactgttcgaggcaaagacaaaacccaactttgaccaagaagagcaatctggattcttgtagcccatggaggtttaccttcttcataggttttttttttttttatgtgattgccatagtgggatattccctctcccacattacccaagagggaaatgggctgtcttaccatgtgctgatgtatgtgctctgccagtgtgaagggtgaacagctccaactttatgtccccccagggacatagtatgagatcggaaaatagttcttagtcctgtttgtcttaatttttattggtttccaaggtctcctaggaaggagagcagagctgtgtggtcctaatcatggtgtcgatgccagatttatttgtaggtccagaggtctccctgagaagaggcatttgtgacaaactcaagtgctgggacctgcatgaattgtttatttgcagtgatgcttcatatttcccagcactgttcatggtatcttatttcccaggtccttcattgtagccatgggcactgaaggactgaattggtaggtaggtcactggttgtaagacctactggggccaggtaagaacagtaattggcccagacaggtaggtgtgataaacagagtagaaaagattgtggccaagaagagtgaatgtgtcccatccaaaggtgcatccagatatgtctgtgttactatggcttcatggtttgggggtatatagaaattctcaggacctcagacctttgattctcctttagcaacacacatcgtcagcataaggcatctaaagattttgtggactcataacttatgtactgtttttgagatgattgctgcacgggcaggaaagcaggatttgagagaacatacaccttgccttccagatatgtggtttttgtgattcacccagatctgttgtgccagttaggaattatctttattacttcccgtttattgccactgctgagaaggctgtccttcctaacttgtgaggagatgaatccttaataataagtaaatcttgtgttatcctatagtctggttttccaaaaggagaggtagatgcatatttttgtgtggaaccatttatcttaaaacattgaggtgcagttttcatacacaaaaccttctatctttttaagaactgtctgtatggtttattgcccagttaatgggttttgatagtcatgttatctcagtaagtgtcttgtcttagaaatatgtgtgtataggctgggtgcggtggctcatgcctgtaatcccagcactttgggaggccaaggcaggtggatcacctgaggtcaggagtttgagaccagcctgaccaacatggtgaaatccagtctctacttaaaatacaaaaattagccaggcgtggtggcgtgcatttgtaatcccagctacacaggaggctgaggcaggagaattgcttgaacctggggggcggaggttgcaatgagccaaggtcgcgccattgcactccagcctgggcgacagagtgacacttctcaaaaaacaaaaacaaaaacaaaaagaacagataagaaatacgtgtgtatatattctattttgtgtgttttcattcaccttatttcattcagtcttccaaatgaaatgttcttaattttgaaaaaaaaaaaaaaaa

SEQ ID NO: 27906 - DNA, 3323 bp, Homo Sapiens
gggctacgctacacggcagtgctgaagcagcaggcaacgcagcactccatggccctgctgcactggggggcgctgtggcgccagctcgccagcccatgtggggcctgggcgctgagggacactcccatcccccgctggaaactgtccagcgccgagacatattcacgcatgcgtctgaagctggtgcccaagcatcacttcgaccctcacctggaagccagcgctctccgagacaatctgggtgaggttcccctgacacccaccgaggaggcctcactgcctctggcagtgaccaaagaggccaaagtgagcaccccacccgagttgttgcaggaggaccagctcggcgaggacgagctggctgagctggagaccccgatggaggcagcagaactggatgagcagcgtgagaagctggtgctgtcggccgagtgccagctggtgacggtagtggccgtggtcccagggctgctggaggtcaccacacagaatgtatacttctacgatggcagcactgagcgcgtggaaaccgaggagggcatcggctatgatttccggcgcccactggcccagctgcgtgaggtccacctgcggcgtttcaacctgcgccgttcagcacttgagctcttctttatcgatcaggccaactacttcctcaacttcccatgcaaggtgggcacgaccccagtctcatctcctagccagactcccagaccccagcctggccccatcccaccccatacccaggtacggaaccaggtgtactcgtggctcctgcgcctacggcccccctctcaaggctacctaagcagccgctccccccaggagatgctgcgtgcctcaggccttacccagaaatgggtacagcgtgagatatccaacttcgagtacttgatgcaactcaacaccattgcggggcggacctacaatgacctgtctcagtaccctgtgttcccctgggtcctgcaggactacgtgtccccaaccctggacctcagcaacccagccgtcttccgggacctgtctaagcccatcggtgtggtgaaccccaagcatgcccagctcgtgagggagaagtatgaaagctttgaggacccagcagggaccattgacaagttccactatggcacccactaccccaatgcagcaggcgtgatgcactacctcatccgcgtggagcccttcacctccctgcacgtccagctgcaaagtggccgctttgactgctccgaccggcagttccactcggtggcggcagcctggcaggcacgcctggagagccctgccgatgtgaaggagctcatcccggaattcttctactttcctgacttcctggagaaccagaacggttttgacctgggctgtctccagctgaccaacgagaaggtaggcgatgtggtgctacccccgtgggccagctctcctgaggacttcatccagcagcaccgccaggctctggagtcggagtatgtgtctgcacacctacacgagtggatcgacctcatctttggctacaagcagcgggggccagccgccgaggaggccctcaatgtcttctattactgcacctatgagggggctgtagacctggaccatgtgacagatgagcgggaacggaaggctctggagggcattatcagcaactttgggcagactccctgtcagctgctgaaggagccacatccaactcggctctcagctgaggaagcagcccatcgccttgcacgcctggacactaactcacctagcatcttccagcacctggacgaactcaaggcattcttcgcagaggttgtcagtgatggtgtacccctggtgctagccctggtcccccaccggcagccccactccttcatcacccagggttccccagacctgttggtgactgtgagtgccagtgggctgctgggcacccacagctggttgccctatgaccgcaacataagcaactacttcagcttcagcaaagaccccaccatgggcagccacaagacgcagcgactgctgagtggcccgtgggtgccaggcagtggtgtgagtggacaagcactggcagtggccccggatggaaagctgctattcagcggtggccactgggatggcagcctgcgggtgactgcactaccccgtggcaagctgttgagccagctcagctgccaccttgatgtagtaacctgccttgcactggacacctgtggcatctacctcatctcaggctcccgggacaccacgtgcatggtgtggcggctcctgcatcagggtggtctgtcagtaggcctggcaccaaagcctgtgcaggtcctgtatgggcatggggctgcagtgagctgtgtggccatcagcactgaacttgacatggctgtgtctggatctgaggatggaactgtgatcatacacactgtacgccgcggacagtttgtagcggcactacggcctctgggtgccacattccctggacctattttccacctggcattggggtccgaaggccagattgtggtacagagctcagcgtgggaacgtcctggggcccaggtcacctactccttgcacctgtattcagtcaatgggaagttgcgggcttcactgcccctggcagagcagcctacagccctgacggtgacagaggactttgtgttgctgggcaccgcccagtgcgccctgcacatcctccaactaaacacactgctcccggccgcgcctcccttgcccatgaaggtggccatccgcagcgtggccgtgaccaaggagcgcagccacgtgctggtgggcctggaggatggcaagctcatcgtggtggtcgcggggcagccctctgaggtgcgcagcagccagttcgcgcggaagctgtggcggtcctcgcggcgcatctcccaggtgtcctcgggagagacggaatacaaccctactgaggcgcgctgaacctggccagtccggctgctcgggccccgcccccggcaggcctggcccgggaggccccgcccagaagtcggcgggaacaccccggggtgggcagcccaggggggtgagcggggcccaccctgcccagctcagggattggcgggcgatgttaccccctcagggattggcgggcggaagtcccgcccctcgccggctgaggggccgccctgagggccagcactggcgtctgcggccgcagcagcactttttgcacagtctggggcggggttccccggcttccaagtcgctgtttcgtcaaagcacgagggccgcctgtggccttaattcctaacggcggccccggttctcccttctcggcaataaaccaggcctagttttgtagccgaaaaaaaaaaaaaaaa

SEQ ID NO: 27907 - DNA, 3763 bp, Homo Sapiens
agtgagagctccccaggggagttctctgtgtctgtgaaatgggcaaactgaggccagagaggggccatgcctgatggagatcgcccagcgggcagttagcatccagtaacagagcccagaggggtccctgcctgggcccaaaatcacacagcagattggggtagagccggagaggacccgagactcctgtgccagcctgggcatcccctccactgccagggaaggactgcatccaagtcgcatccgtacccaggccgaggtgtccgaggcccaggctgaaatccggttgctgctgcagagaccaagtttccaaggccttgtcaagtgggctgtgccagacgatccccaggcctgtcattggctgctcttcggctcggacacaccaaacctcaccaagcacttccatttctgagggaatagaggttgtggcttccgtcaagcacccatttaccccaccctcctcctcctcttcctgcaaacttgagtcacagctgccctgctgggctcaggccccagggatgtctgagtcagcctggctggggttccagtcctgacaccgcccttaccagctgggagactccgggaacctccaaccctgctgagcctccacttcgacatccgtgaaacagccatgaataagcaggtctcaaaggtcgactcctgtatgcagggacacagcatgcagtaggtgcccaatcataacagcagcacccacctggagccccttatagcagcccttctcctctgcacttccacatggcatctcatttaaccttcaccacaacccaactaggaaggcaccatcattatcccattttactgatgaagaaactgaggcccaggaaggtgaatttaccagccagctcacaaatggactagtagatggcagtttgtggattggagcccagaggctgtgctcctgcccacaccctctcaaatgagggctataaaataacactctaagagctcttcctacgtgcctggcagtgtactaagaatttgagtcttcagtacgttcaatcttcacaacagccctatgaggtgggggttatgaggagccaccattttacagatgggtaagtcaagacacagagagaggatgtggcttgccacagaccacatggctggtgagcataggagccaagattccaacccgtttcccatcctggccaagaataacactcctgcttcttcatttctccgaaagaagccatgctgtctccatccctggctgtgacttgggctgcttgtcccttctctgcccacccacccacccccagggctgtgccggggaaagaaggtggttcctggagccctctagcctctgaaaagcatggcagtggcgcaacgtagaggatgggcttaaagccaaagaaacacagcttcttttgttgttgttgttgttgtttgggtttttgtttttgttttgttttgagacagagtctcactctgtcccgagagtgcagtggtgtgatcctggctctctgcaagctctgcctcctgggttcacgccattctcctgcctcagcctcccgagtagcttggattacaggcgtgtgccaccacgcctggctaatttttgtatgtttagggttttgccatcttggccaggccagtctcgaactcctgacttcaggtgatccgctcacctcggcctcccaaagtgctgagattacaggcgtgagccaccatgcctggccaagaaacatgggttctaatcccaatgcccccgcttcctagctatgggaccttgattgagtcctgtaccgtgcctcagtttccccacttataaaaagaggttactaaaaaggatgcttcactcaagggtgtgaagacccagtgaatgaagtgttaataagagctccacgtatagcgatgctgctgttcagctgcaccagggtggactcccttgacttgctgggagttacaatgaggaaggaaggaccgttaaacctgtaggtctttccagagaaagtgcgtttcctaaaaccaaatcctgcccttgctccaaaactgtcagtggtggtttcccatgaccacgccacagtcccagggtctcccctggccttcaaggctggcacagtctgaccctgccaacgtccctagtgccaccatctgtcagcccctccttgctcctgctcctggtctgcacatgctgttctctttgccaagaatgccatttccccagccccctggtcccgatggggaacacctcctcatccttcaaagccaagctggaagggaacatctttggagatgccgcttgacctcccaggcagaaggggtcattctccctggagatgtggtcacgtcattaaccacactgggttagaatcatcagaagctgttcctgcctcttccgtcaagcaaggggctctggaggccagaaaatgcctatgaatcatgcccacacccccagagcccagcatggggcgggctcaggttaggtcaatcgtgtttgaagactgaataaatgaatgtcttcatttgctaccctcagaagcccagtccggaaaaatattccagtgcaaggtttttggcttgaatgagatcccaagaatcaccttcaggttgtcaggaaaatgatacagggaagggaaggagccaacaaagggtatgggaatgagcacataacactatggacagctggggaaccttgggcgatgatgcagaactgtttatcactaactctcaccaggtcagttgtgcatcaaggctactcgggggatagcactttacagcctactctagcaccacggtggccttctggggcaggggccagcaggctgcagctgctggatgaagcccccaggcagagtcgctggtcctcaggtgctcaagcttagctggaagccttcaggttgctgtgcaatggaatagtgagtacccagaggatatgtgcgtgtgttacagtgagtgagtgaatgaacgaatgaatggagaatcaagaaaagagccgcgtatcttcagtcattgagcagacacgggccttctgctgtgtggccctggacgagccatcatgcctctctgaccctggtttcctcttctataaagcaggaatgctagcccagcctcccaggagataaagggtgggaggtccccagagagtgagaagggttccacctgggctcccagactcaatctcagctccaggaagcaggacatggccccagtgagggttctctgtgggtgaagaagccacagaaggcaggcacagtgccctggttggaaccacaggggccccgaagcaaccacatcatggccaccacagcctccaccatcccacagcaatttccgctgctgcctctcccagggcaagatctcccaccagtggctggctgtcccctctgccagcacctgccccgggtgggccctgcagcatggccatggctgctgcaaggcaggctggcagctgctcctgtgtgcagcagcgtgtctgctttgaaaagccacagagactcctgtggttaggggctcatgttacagtagcacacgttcgaatcccagttctactacttgtgactgtgggaaagtaatttcaccccagtcctctctggtctcattgatcaaatggaactaacattctattgtcccctctggtggtctcaactccagcagtttgtgagatggttgccttcactgttttccctactgcaaaacccataaggacacagttatcttgcctcctgccccaaccccagggtcttgaacacagtaagtgctcgataaatgcttggtaaatacatgaaaaaaaaaaaaaaaa

SEQ ID NO: 27908 - DNA, 3596 bp, Homo Sapiens
tagaggggcgggactggtgcggccgagtgacagttgaccggttttaaccaagtgactggttctagccacgttatgtgcggcccagccatgttccctgccggtcctccgtggcccagagtccgagtcgtgcaggtgctgtgggccctgctggcagtgctcctggcgtcgtggaggctgtgggcgatcaaggatttccaggaatgcacctggcaggttgtcctgaacgagtttaagagggtaggcgagagtggtgtgagcgacagcttctttgagcaagagcccgtggacacagtgagcagcttgtttcacatgctggtggactcacccatcgacccgagcgagaaatacctgggcttcccttactacctgaagatcaactactcctgcgaggaaaagccctctgaggacctggtgcgcatgggccacctgacggggctaaagcccctggtgctggtcaccttccagtccccagtcaacttctaccgctggaagatagagcagctgcagatccagatggaggctgcccccttccgcagcaaagagccatgcatggcagaagaagtgtgtagcatgagctggtacacgcccatgcccatcaagaaaggcagtgtggtcatgcgtgtggacatcagcagcaatggcctggggaccttcattccagataaaaggttccagatgaatatcaacggcttcctgaagagagaccgggacaataacatccaattcactgtgggagaggagctcttcaacctgatgccccagtactttgtgggtgtctcatcgaggcccttgtggcacactgtggaccagtcacctgtgcttatcctgggaggcattcccaatgagaagtacgtcctgatgactgacaccagcttcaaggacttctctctcgtggagctgagcattgacagttgctgggtgggctccttctactgcccccattctggcttcacagccaccatctatgacactattgccaccgagagcaccctcttcattcggcagaaccagctggtctactattttacaggcacctataccacactctatgagagaaaccgcggcagtggcagttggattcgtgtcctggccagcgagtgcatcaagaagctgtgccctgtgtatttccatagcaatggctctgagtacataatggccctcaccacgggcaagcatgagggttatgtacacttcgggaccatcagagatggccaggtgtcctttgagatgctgcccaggcagtggtctgtgtgcgagcagataggagctagtgatgacctggaacttctctaccacatcccagaattcatccctgaagctcgaggattggagttcctgatgatcctagggacagagtcctacaccagcactgcaatggcccccaagggcatcttctgtaacccgtacaacaatctgatcttcatctggggcaacttcctcctgcagagctctaacaaggaaaacttcatctactggcagacttccccaaggaactgtccatcaaatacatggccagatcgttccgtggggctgtggctattgtcacagagacggaggagatctggtacctcctggagggcagctaccgggtctaccagctgttcccttccaagggctggcaggtgcacatcagcttaaagctgatgcaacagtcctctctctacgcatccaatgagaccatgctgaccctcttctacgaagacagcaaactgtaccagctggtgtaccttatgaacaaccagaagggccagctggtcaagaggctcgtgcccgtggagcagcttctgatgtatcaacagcacaccagccactatgacttggagcggaaagggggctacttgatgctctccttcatcgacttctgccccttctcggtgatgcgcctgcggagcctgcccagtccgcagagatacacgcgccaggagcgctaccgggcgcggccgccgcgcgtcctggagcgctcgggcttccacaacgagaactcgctcgccatctaccagggcctggtctactacctgctgtggctgcactccgtgtacgacaagccgtacgcggacccggtgcacgaccccacctggcgctggtgggcgaacaacaaacaagaccaggattactacttcttcttggcgagcaattggcgaagcgcgggcggcgtgtccatagaaatggacagctacgaaaagatctacaacctcgagtccgcgtacgagctgccggagcgcattttcctggacaagggcactgagtacagcttcgccatcttcctgtcggcgcagggccactcgttccggacgcagtcagaactcggcaccgccttccagctgcatagccaggtggacgtgggcgtggtgctggccgaccccggctgcatcgaggcctcggtgaagcaggaggtcctgattaatcgcaactcggtgctattttcgattacgctcaaggataaaaagctttgctatgaccaaggcattagtggacatcaccttatggagacttccatgacggtcaatgtggtgggttcatcggggctctgcttccaggaaacacacctggggccccatatgcaaggcaacctgatggtgccagtgttcattggctgccccccaggcaagcgcctggccttcgacatcacctacacgctggaatacagccgcctgaagaacaaacactactttgactgcgttaacgtgaacccggagatgccctgctttctcttccgggacattttctaccccttcttcttgattcaagatttggtgacaggagactccggcagtttccagggcagctatgttctgctggtggtgggtggcgggcccacactggacagcctcaaggactacagtgaggacgaaatctaccgcttcaacagccccctggacaagaccaacagccttatctggaccacgaggaccacaaggaccaccaaagactcagcctttcacatcatgtcccacgagagcccaggcatcgagtggctctgtctggagaatgccccatgctatgacaatgttccccaaggcatctttgcccctgaattcttcttcaaggtgttggtgagcaatagaggagtggacacgagcacctactgcaactaccagctcaccttcctgctgcacatccacgggctgccactcagtcccaagcgggcccttttcatcatcatggtgtcagctagcgtgtttgtgggcctggtgatcttctacatcgccttctgcctcctgtggcccctcgtggtgaagggctgcacgatgatccggtggaagataaacaacctcattgcctcagaatcctactacacctacgcctccatttccggaatctcgagcatgccatctctgagacattccaggatgggctccatgttcagctccaggatgacagaggacagggctgaacccaaggaagccgtggagagacagttgatgacctgagtgtcccacctgccccagcccccagttactgtcacgcctctcttatgaggcccatcttgaagatgcaacctgtcacccagcccaggcctctctttctgttttgcttgatgtttacttctcgttcagactcaaataaagccttttttcaggaaaaaaaaaaaaaaa

SEQ ID NO: 27909 - DNA, 1109 bp, Homo Sapiens
actggcgggcgccaagatggacgctccgtgggctcgggagcagctacggcggcgttacctgtttccttccgaagtagagctggactgcgaggacgaggccaagccggaaacacccacagctgttgagaaaaaggagcgacctcttccaagacttaacattcattctggattctggattttggcatccatcgttgtgacctattatgttgacttctttaaaacctttaaagaaaattttcacaccaatagttggtttctctttggcggagccttgttatttgtcagcctgtcaattgcattttactgcatagtctatctggaatggtaccgtgggattgaagaatatgatgtcaaatacccaacactggtgcccatcacaactgcaactttcattgcggcagggatttgcttcaacctggctctgtggaatgtgtggtcatttttcactcccttgctgctgttcacccagtttatgggggtcgtgatgttcatctcactcctcggataagctctgacttcagaacatgaccatttaaagtgaacaaagcgtccagcttgtcggctgacgtgaaggagaagctcagtgtgcactgctgtctccgcagtgagttgttccatggagaaactgtgactctctagatctgctgtcgaaatcagaataaatgatctttctctctgctgttcaaaacaagtgattgcttctcagcagtttgtgttagaactagcgagtgttaacctgtcagcttttagagacagtagtagctcatcacaggagcacagtgccaacagttttacagattctggcctgttctacttgaaggctagctgcccttgtataggtgactggacacaagcatgacagaatcgtgttgtcaccgttagtagtcactggatagctcgtatttgtcatagttttttaagaagaggaccaaacggaagtatcttatggtttcttgttactctgggttttatcattatataagttattgggtttttaacatttttcaacttatgttcttttaataatgtttaagtatatataatttttttctgtaacatcaataaaatatttttataacaaaaaaaaaaaaaaaaaaaaaaaaaaaaaa

SEQ ID NO: 27910 - DNA, 945 bp, Homo Sapiens
aagaacaccaaagagaagatctctgtgacctggggttaggcgaagatttcttagaaatggcaacaaaacatggcctatagtggaaaaaatggatgaactagacttcatcaaaacgttcgaaactctgctctcagaagacaccgttaagggaatgagaagacaagccacagactaggagacatgcctgagaaaggacttgtctctgagatacacaaaggaaccttaaaactcagcagtaagaaaaaaaatccatgtgaaaagacgggcagaatatttgaagcagacaccaccagagaagacacgtgcatgcagacaagcacacggagaggggtccgcgtgggccccatcagggaagtacagacaagcacacggagaggggtccgcgtgggccccatcagggaagtacagacaagcacacggagaggggtccgcgtgggccccgtcagggaagtaccgacaagcacacggagaggggtccgcgtgggcgccgtcaggaaagtaccgacaagcacacagagagggggccgtgtgggcgccgtcagggaagtgcggacaagcacactggagaggggtccgcgtgggcctcgtcagggaagtgccgacaagcacacagagagggggccgcgtgggcgccgtcagggaagtgcggacaagcacacggagagggggccgcgtgggcgccgtcagggaagtgcagatggaaaccacagcgaggcccctgcacactctccagggggctcagacaatcaaataaactgccggcacctcgagctgagcaggccgcggggtgggggcctcgtccacacccggccgagcaacgcggcagagccactgtggacagcttctcatcacagccaaaggtggcccagcagtcctgttcctgggtccttgctcaagagaaatgaaaacagaggctcacacataaaaaaaaaaaaaaaaaaaaaa

SEQ ID NO: 27911 - DNA, 5497 bp, Homo Sapiens
ccccctcagcccctccgcgtcgcctccccgcgggccgcccctctcggccctgcgccccgcggccccgcagcctccgcgcggcctcccgccccatccccgccactttccccggagctgggccgcgaacacctcactattgatggtgtagcgctttaggggaagcatttttgaaacgttggggttgttggagtggttggattttccctggaattgagtgagaaattcagaagactgaagcccaggcttactgtctacctttcacggaggcctagccgtgagaggacagaagaaggcacgtggcgaatcatgacagcggacaaagacaaagacaaagacaaagagaaggaccgggaccgagaccgggaccgagagagagagaaaagagacaaagcaagagagagtgagaattcaaggccacgccggagctgtaccttggaaggaggagccaaaaattatgctgagagtgatcacagtgaagacgaggacaatgacaacaatagtgccaccgcagaggagtccacgaagaagaataagaagaaaccaccgaaaaaaaaagtctcgttatgaaaggacagataccggtgagataacatcctacatcactgaagatgatgtggtctacagaccaggagactgtgtgtatatcgagagtcggaggccaaacacaccgtatttcatctgtagcattcaagacttcaaactggtccacaactcccaggcctgttgcagatctccaactcctgctttgtgtgaccccccagcatgctctctgccggtggcatcacagccaccacagcatctttctgaagccgggagagggcctgtagggagtaagagggaccatctcctcatgaacgtcaaatggtactaccgtcaatctgaggttccagattctgtgtatcagcatttggttcaggatcgacataatgaaaatgactctggaagagaacttgtcattacagacccagttatcaagaaccgagagctcttcatttctgattacgttgacacttaccatgctgctgcccttagagggaagtgtaacatctcccatttttctgacatatttgctgctagagagtttaaagcccgagtggattcatttttctacatattaggatataaccctgagacaaggaggctgaacagtacccagggggagattcgtgtcggtcctagtcatcaggccaaacttccagatctgcaaccatttccttctccagatggtgatacagtgacccaacatgaggaactggtctggatgcctggagttaacgactgtgacctccttatgtacttgagggcagcaaggagcatggcggcatttgcaggaatgtgtgatggaggctctacagaggacggctgtgtcgcagcctctcgggatgacaccactctgaatgcactgaacacactgcatgaaagcggttacgatgctggcaaagccctgcagcgcctggtgaagaagcctgtgcccaagctcatcgagaagtgctggaccgaggacgaagtgaaacgcttcgttaagggactcaggcagtacgggaagaacttcttcagaattagaaaggagctgcttcccaataaggaaacaggggagctgatcaccttctattactattggaagaagacccccgaagcagccagctcccgagcccatcgtaggcaccgcaggcaggccgtgttcaggaggattaagactcgcaccgcgtccacacccgtcaacacaccctccagacccccgtccagtgaattcttggacctaagttcagccagtgaagatgacttcgacagtgaggacagtgagcaggagctgaaggggtacgcctgccgccactgcttcaccaccacctccaaagattggcaccacggaggccgggagaacatcctgctttgcaccgactgtcgcatccacttcaagaaatacggtgagctcccgcccattgagaagcccgtggacccgccaccgtttatgttcaaacccgtcaaggaagaggatgatgggctcagtgggaagcatagcatgaggacacggcggagtcggggctcgatgtcgacactacgcagtggtcggaagaagcagccagccagccctgatggtcgcacctcacccatcaatgaagacatccgctccagcggccggaactcccccagcgctgccagtacctccagcaatgacagtaaagcagagacagtgaagaagtcggccaagaaggtgaaggaggaagcctcttcccctcttaagagtaacaaacgccagcgggagaaggtggcctctgatacggaggaggctgacaggaccagctccaagaagacaaaaacgcaggagatcagcaggcccaactcgccatctgaaggtgagggagagagttcagacagtcgcagcgtcaacgatgagggtagcagtgaccccaaagacatcgaccaggacaatcgcagcacgtccccgagcatccccagcccccaggacaatgagagtgactcggactcgtcagcccagcagcagatgctgcaggcccagcccccagccttgcaggctcccactggggtcaccccagctccctcctcagctcctccagggacccctcagctgcccacgccagggcccacgccctctgccactgcagttcccccacagggctcccccacggcctcccaggcccctaaccagccgcaggctcccacagcgcctgttccccacacccacatccaacaggcaccggccttgcacccccagcggccgccctcaccgcatcccccgccgcatccctcgccacatcccccactgcagcctctgactgggtcggcgggccagccttctgcaccctctcatgcccagcccccactgcacggtcagggcccacccggccctcacagcctgcaggctgggcccctgctgcagcacccaggccccccacagccctttggcctccctccccaggcctcccaaggccaggcccctctggggacctccccagcagcagcgtaccctcacacctccctgcagctgccagcctctcagtcagcgctgcagtcccaacagcctccacgggagcagcccctgccaccagcgcccttggccatgccccacatcaagcccccgcctaccactcccatcccccagctgccggcgccacaggcccacaagcaccctccccacctctcggggccctcacccttctccatgaatgccaacctgcctccccctccagccctgaagcccctgagctccctgtccacacatcaccccccgtcggctcaccccccacccctgcaactcatgcctcagagccagccattgccctcctcgcccgcccagccccccgggctgacccagagccagaacctgcccccgccccctgcctcccacccccctacaggcctccaccaggtggccccccaacccccgtttgctcagcacccctttgtccctggaggccctcctcccatcacccctccgacctgcccctccacctctaccccaccggcgggacctggcacctcggcccagccaccctgctctggtgcggcggcttcaggaggcagcatagcgggggggtcgtcctgcccactccccaccgtccagatcaaggaggaggctctggacgacgctgaggagcctgagagcccccctcccccaccaaggagcccgtccccggagcccactgtggtggacacccccagtcacgccagccagtcagctaggttctacaaacacctggaccggggctacaactcgtgtgcccggacagacctgtacttcatgcctctggccgggtccaagctggccaagaagagggaggaggccattgagaaggccaagcgcgaggctgagcagaaagcccgagaggagcgagagcgggagaaggagaaggagaaggagcgggagcgggagcgagagcgggagcgcgaggcagagcgggcggctaaggcgtccagctcagcgcatgaaggtcgcctcagtgacccacagctcagtggtcctggccacatgcggccatccttcgagccaccaccaaccaccattgctgctgtgcccccctacatcgggcccgacacacctgcccttcggactctgagcgagtacgcccggccccacgtcatgtcgcccaccaaccgcaaccaccccttctacatgccccttaaccccacggaccccctgctggcctaccacatgcctggcctctacaacgtcgaccccaccatccgcgagcgggagctccgggagcgggagatccgagagcgggagatccgggagcgtgagctgcgggagaggatgaagccgggcttcgaggtgaagcccccagagctggaccccctgcacccagccgccaaccccatggagcactttgcccggcacagcgccctcaccatccccccgaccgccgggccccacccttttgcttctttccacccgggcctgaaccccttggagagggagagactggccctggcgggcccccagctgcggcccgagatgagctaccctgacagactggcagccgagcgtatccacgcagagcgcatggcatcgctgaccagcgatcccctggcccgactgcagatgttcaacgtgactccgcaccatcaccagcactctcacattcactcccacctccacctccaccagcaggaccccctccaccaaggttcagcaggccccgttcacccgctggtcgaccccctgactgccggtccccacctggctcgcttcccctacccgcctggcactctccccaaccctctgcttggacagcccccacacgagcacgagatgcttcgccacccagttttcggcaccccctacccccgtgacctgcctggggccatcccaccccccatgtcagcagcccaccagctgcaggccatgcatgcccagtcggccgagctgcagagactggccatggagcagcagtggctgcatggacacccccacatgcatggtggccacctaccaagtcaggaagattattacagtcgactgaagaaagaaggtgacaagcagttataagttatttatttgttaacgctggctgtggaaaccccagttcttggggggagaaacaggactttttacataaaataggagctgcaaaagcaaaaagaatatcttctaaagatttctttatatatttaaaaacccacaactaaaaatgtatccacatagtagtgttcgtttgtcgagaggatttcctgagactggtttggatctccctgcatgacagtcccccagaaacttagtgagtcctggactggactgaacatccagaaagcttccctgcaatcttggggtttggctttagttttcttttccttgatttctcagtaggtgctagaatccagttcacacccttcactgtgcgtgcagacacactgacacactccgccacgagtgctccagagcccacgaggcttgcagatcgggggcataggaatttggaatccaagagctataatttttaaaaaaaaaaaaaaaaaaaaaaaaaaaaaaaaaaaaaaa

SEQ ID NO: 27912 - DNA, 1935 bp, Homo Sapiens
gcagggacaggagggctggcaagggagggtccagggctaggggattcggagtggcttcaggcggaccacgtggctaccttttttccagggccagactttggcagcgtgtaaggtctgaggacaggggcaccggaggccgaggatgagaggccagtgcctgtttccaggcagccagggcctcagaaactccggccggagcactcacccgtcggtggaggccgttaccagggccaccttatttgcgagcgggtcccggcgggtcatcccggagctggccatccgcaccgaattccaagcccgggcacagaggcctagcagccccgccttgtgcatggatcagaccagcaagtgccacttcggataaaccctttggactcctaactccaatcaggtgtctgctttgttgaggactcacagacacagtctcctttcttcaagatctttacaatgcaagacctcactaacacacagggatggtctcccagagggtctgtgctgttccttcactcagaacatcaagatgcactgaagtaaggatcctctattctacagttcctgctagctgagctattccatgggggcttcagcaggaaattccaaggttggctttgacaagctaaggccggctggtggagcacatcgagttctggaggttcatgtgtgttttcatgaagatctgtctgcccgtagcagataaagagttgttgccccactcctcctggggtcttctattttcctgggaggaatttctggattaactgaacacacacacacacacacacacccttttgaagcatcaacagtaattctgagttcttagggacaatgcagattaaatccacaataagaaagacaactatggccaggtgtggtggctcacgcctgtaatcccagaactttgggaggctgaggcggatggatcacctgaggtcaggagttagagaccaacctgaccaacatggagaaaccccgtttctactaaaaatgcaaaattagccgggcatggtggcaggcgcctgtaatcccaaatactcgggaggctgaggcaggagaatcacttaaacccgggaggcagaggttgcagtgagccaagatcgcgccattgcactccagcctgggcaagaagagcaaaactccatcctgggcaagaagagcaaaactccatctcaaaaaaaaaaaaagagtactattgatccagaggtgaccagactagcctcactggagataataggtgacattattatgcaaagtggtttcagttcccttgtcttgtttttggaatagtataagaggcctacaatacgaataaataaggcccatcacaagcctcaccaaaggacaaaactaatccacttctgaagaaggctctttgttgggccagatcaaatccttggacagaactgtactcttaatctctgtagtgaaagtggggggtagtttaagaatttattaaccttctaccttgagcaatccctcagaagtaagaggtgtcaggcctctgagccgaagctcagccattgtaacccctgtgacctgcacatatatgtccagatggcctgcaggagccaagaagtctggggcagctgaaaaaccacacaagaagtaaaacagccagttcctgccttaactgattaaccaacattacaacattccaccattgtgacctgtccctgtcctaccttaactgatcaatcgaccttgtgacagtcttcttctggacaatgggtcttatcatctccccaccatgtaccttgtgaccccctcctctgctaacaatagataaccactttttactgtaattttccattacctacccaactcctataaagcaaccccttccccatctcccttcactgactctgttttcagactcagcccacttgcactcaagtgaataaacagccttgttgctcacacaaaaaaaaaaaaaaaaaa

SEQ ID NO: 27913 - DNA, 2332 bp, Homo Sapiens
atgacacccctgaacctgtcgtcccgggcagagccggtgcgcgacatccgctgtgagttctgcggcgagttcttcgagaaccgcaagggcctgtcgagtcacgcgcgctcacacctgcggcagatgggtgtgaccgagtggtccgtcaatggttcgcccatcgacacactgcgagagatcctcaagaagaagtccaagccgtgcctcatcaagaaggagccaccggctggagacctggcccctgccctggctgaggacgggcctcccaccgtggcccctgggcccgtgcagtccccactgccgctgtcgcccctggctggccggccaggcaaaccaggtgcagggccggcccaggttcctcgtgagctcagcctgacgcccatcactggggccaagccctcagccactggctacctgggctcagtggcagccaagcggcccctgcaggaggaccgcctcctcccagcagaggtcaaggccaagacctacatccagactgaactgcccttcaaggcaaagacccttcatgagaagacctcccactcctccaccgaggcctgctgcgagctgtgtggcctttactttgaaaaccgcaaggccctggccagccacgcacgggcacacctgcggcagttcggcgtgaccgagtggtgcgtcaatggctcgcccatcgagacactgagcgagtggatcaaacaccggccccagaaggtgggcgcctaccgcagctacatccagggcggccgccccttcaccaagaagttccgcagtgccggccatggccgtgacagtgacaagcggccgtccctggggctggcacccgggggcctggccgtggtcggccgcagtgccggaggggagccagggcccgaggctggccgggcagccgacggtggtgagcggcctctggcagccagcccgccaggcaccgtgaaggctgaggagcaccagcggcagaacatcaacaaatttgaacgccgacaagcccgccctccagatgcctccgcagcccggggaggcgaggacaccaatgacctacagcagaagctggaggaggtgcggcaacccccaccccgagtccggccagtcccctccctggtgccccggcccccccagacatcacttgtcaagttcgtgggcaacatctacaccctcaaatgcaggttctgtgaggtggaattccagggccccctctccatccaggaagagtgggtgcggcacttacagcggcacatcctggagatgaacttctccaaagcggaccccccacctgaggagtcccaggccccgcaggcacagacagcggcggcagaggctccctaacacaaaagcattccagatcccctctcgtgccacctctgtctcctcttcttcctcctctgtgtcctcgtccctcttcctctttctttccgtttccaaaggagcaagccaaaacctcaaaccggcgccccttgggggccgggcacactacagccagggcgccgggagccagctagctgcccttcccccagcccgaggactctggggccacagggtgtcttccttcagcccatgcccacctggtccagcaggggcagcagccaggtctctgatggcagccggtctggtcacaggggaggacagcactcccccgtctagcagccaggcagggcgatgtctgccatccgtggccatttgcaaagaccccaaagacccctgttctggttccctctctcccccatgaatatcctctcacacacatgtacatgcgaacacacacaacacgcacctcgtgagacccgggacctgccccggacccccagttcctgggttgaacgaccacatcatgccacggtgcttgctcaggggaagccacgctccctctgtggggcctgctggggcctgggagccccccactgagcccacaatgccacggaaatccttgttggctgcccccgagaggggccttcccagctgggaagagctcagagctgacagctgcctcctgccatgtcaaggccccccaaagagcctcaggggctctggggccctggagggtggggttggggggtgggactctcctcccccactcctgctccctctcccttttcactgttgctttctatgtatagctccctagacctttcacttttttaaaaacgcgttttgtgtagagaataaggaacgtggatctttttattttgcaatcctgggccagctagaagccaggagctgattgaccttttaacttttttcagtggccacattttggttatcgatgtacctagaagtatgtaaattagattaaatttctcttctggaaacaccctgggaaaaaaaaaaaaaaaaaaaa

SEQ ID NO: 27914 - DNA, 2003 bp, Homo Sapiens
ctccaccgcgcgcctctcaggccccgcccgccagcgtccctttgttgtgaaggcgccggggcctagcgctatgcctgcggcggagactgcatcaggctctcgtcctcgggctccacccagggagctgtgcccagacagcagaagggaaggatgtcacttctgagatgaggttcagaaaggcctgggctcctgtcctggctgctctctcccactccctgatgagcttgctggatgaaagctcctgtcaggctgtggggcgtcctgtggagaaactggcaagaaactggtgggggccctttccacctatagccagcaaggaactgaacccagccagcgtccacctgagtgagctcagaggtgggcctcagccccagttgagccttcggatgaggtcacagccctggtccatggtgtgactgcagcttcaggagggaccttaagccagaggtgcctggctaagcttcccgcagattgctgccccacaggagccaacatcaaaagcatttgttgttttgaggtgcgtctgcttctacgctttgcctgggagaggccctggtggcctcgttcctggcgcccggagtccctgctgcggccccacccccgggcggtcacggtgacccatgctgcccagcctggaggtaaaatcgttcgtggctgtggcttcagcatgtcgtcctcggtgaaaaccccagcactggaagagctcgttcctggctccgaagagaagccgaaaggcaggtcgcctctcagctggggctctctgtttggtcaccgaagtgagaagattgtttttgccaagagcgacggcggcacagatgagaacgtactgaccgtcaccatcacggagaccacggtcatcgagtcagacttgggtgtgtggagctcgcgggcgctgctctacctcacgctgtggttcttcttcagcttctgcacgctcttcctcaacaagtacatcctgtccctgctgggaggcgagcccagcatgctaggtgcggtgcagatgctgtccaccacggttatcgggtgtgtgaaaaccctcgttccttgctgtttatatcagcacaaggcccggctttcctacccacccaacttccttatgacgatgctgtttgtgggtctgatgaggtttgcaactgtggttttgggtttggtcagcctgaaaaatgtggcggtttcgtttgctgagacggtgaagagctccgcccccatcttcacggtgatcatgtctcggatgattctgggggagtacacaggacgtcccagtgatcgggaggagtgggaagagcttcagctacaaccaggacgtggtgctgctgcttctgacagacggagtcctgttccaccttcagagcgtcacggcgtacgccctcatggggaaaatctccccggtgactttcaggcccagtaaatgcggatgtttatcttccattgtttgtttcctgagattcagatgtctaaagcatttttctgtgacttttcaagtcaagaggaaaacctgacatatggaaagggaattaattgctcgttttatcctcttctcctgcaatgctctgaatccatgggtttggagtggggccctgggagttgggggaagcaccatacccagtgagtctgcactttgaggacccactgccagtgtcagcttcaaaatcacattgtaaaaggcccggcgcggtggctcacgcctgtaatcccagcactttaggaggacgaagcaggcggatcacttgaggtcaggagttcgagaccagcctggccaatatggcgaaacctcgtctctaccaaaaatataaaaattagccgggcgtggtggcgcgggcctgtggttccagctactcgggaggctgaggcaggaaaattccttgaacccgggaggaggctgcagtgagccaagaccacgccactgcactccaacctgggcggcagagcaaggctccgactcaaaagtaaatacatgaataaataaaataaaatcacatcgtaaaaaaaaaaaaaaaaaaaaa

SEQ ID NO: 27915 - DNA, 2225 bp, Homo Sapiens
gcgcctcctcagctgtccgcaccgctcgtgccgggactgcctccgccactacctgcgcctggagataagcgagagcagggtgcccatcagctgccccgagtgcagcgagcgactcaacccgcacgacatccgcttgctgctcgccgacccgccgcttatgcacaagtacgaggagttcatgctgcgccgctacctagcctcggaccccgactgccgctggtgcccggccccggactgcggttatgctgttattgcctatggctgtgccagctgcccgaagctaacttgtgagagggaaggttgccagactgagttctgctaccactgcaagcagatatggcatccaaatcagacatgcgatatggcccgtcaacagagggcccagactttacgagttcggaccaaacacacttcaggtctcagttatgggcaagaatctggaccagatgacatcaagccatgcccacgatgcagtgcatacattatcaagatgaatgatggaagctgtaatcacatgacctgtgcagtgtgtggctgtgaattctgttggctttgtatgaaagagatctcagacttgcattacctcagcccctctggctgtacattctggggcaagaagccatggagccgtaagaagaaaattctttggcagctgggcacgttgattggtgctccagtggggatttctctcattgctggcattgccattcctgccatggtcattggcattcctgtttatgttggaaggaagattcacagcaggtatgagggaaggaaaacctccaaacacaagaggaatttggctatcactggaggagtgactttgtcggtcattgcatccccagttattgctgcagttagtgttggtattggtgtccccattatgctggcatatgtttatggggttgtgcccatttctctttgtcgtggaggtggctgtggagttagcacagccaacggaaaaggagtgaaaattgaatttgatgaagatgatggtccaatcacagtggcagatgcctggagagccctcaagaatcccagcattggggaaagcagcattgaaggcctgactagtgtattgagcactagtggaagccctacagatggacttagtgttatgcaaggtccttacagcgaaacggccagctttgcagccctctcagggggcacgctgagtggcggcattctctccagtggcaagggaaaatatagcaggttagaagttcaagccgatgtccaaaaggaaattttccccaaagacacagccagtcttggtgcaattagtgacaacgcaagcactcgtgctatggccggttccataatcagttcctacaacccacaggacaggtttagcatgatccatgcatgactcagcaaagtggattttgtctccacagagaatgcaacaatatggaaatccaagtggacattgaagccaaaccaagccactatcagctggtgagtggaagcagcacggaggactcgctccatgttcatgctcagatggcagagaatgaagaagaaggtagtggtggcggaggcagtgaagaggatcccccctgcagacaccaaagctgtgaacagaaagactgcctggccagcaaaccttgggacatcagcctggcccagcctgaaagcatccgcagtgacctagagagttctgatgcacagtcagacgatgtgccagacatcacctcagatgagtgtggctccccccgctcccatactgcagcctgcccctcgacccccagagcccaaggtgcaccgagcccaagtgcccatatgaacctctctgccctagccgagggacaaactgtcttgaagccagaaggtggagaagccagagtatgaagtggaatgaatgctcctgttctgagaagcacacttgtaactgcatcttttggaatttttttttttttttttccaaggggtagagatttatgtattttatttcacagattctctggtcacaggtttttgcccagggaaattctgagaaattcacaatttcttaccagataaaacatgaaaagtttgccgttagttcccctcccctcccctccctctttttagttttaatttattagttaaactgatggcagcaatccatgaggtgtgtcaaagagtgtacatatgtatgtgtgtatattgaatgctaaacatattactgaaagacacattttaataaagatttctgtcataaaaaaaaaaaaaaaaaaaaaaaa

SEQ ID NO: 27916 - DNA, 1087 bp, Homo Sapiens
ggggagtgcacgccgggcaagaggaagacctccatcagctcgccgcgcagcgcggctgtatttgcggcctgtgcgagtaggcgcttgggcactcagtctccctggcgagcgacgggcagaaatctcgaaccagtggagcgcactcgtaacctggatcccagaaggtcgcgaaggcagtaccgtttcctcagcggcggactgctgcagtaagaatgtcttttccacctcatttgaatcgccctcccatgggaatcccagcactcccaccagggatcccacccccgcagtttccaggatttcctccacctgtacctccagggaccccaatgattcctgtaccaatgagcattatggctcctgctccaactgtcttagtacccactgtgtctatggttggaaagcatttgggcgcaagaaaggatcatccaggcttaaaggctaaagaaaatgatgaaaattgtggtcctactaccactgtttttgttggcaacatttccgagaaagcttcagacatgcttataagacaactcttagctaaatgtggtttggttttgagctggaagagagtacaaggtgcttccggaaagcttcaagccttcggattctgtgagtacaaggagccagaatctaccctccgtgcactcagattattacatgacctgcaaattggagagaaaaagctactcgttaaagttgatgcaaagacaaaggcacagctggatgaatggaaagcaaagaagaaagcttctaatgggaatgcaaggccagaaactgtcactaatgacgatgaagaagccttggatgaagaaacaaagaggagagatcagatgattaaaggggctattgaagttttaattcgtgaatactccagtgagctaaatgccccctcacaggaatctgattctcaccccaggaagaagaagaaggaaaagaaggaggacattttccgcagatttccagtggccccactgatcccttatccactcatcactaaggaggatataaatgctatagaaatggaagaagacaaaagagacctgatatctcgagagatcagcaaaaaaaaaaaaaaaaaaaaaaaaaaaaa

SEQ ID NO: 27917 - DNA, 3181 bp, Homo Sapiens
ggcggccgctcgggcaggatggcggcggccgcggtgggcgcgggccacggcgcggggggcccgggcgcagcgagcagcagtggtggggcgcgcgagggcgcgcgggtggcggcgctgtgcctgctgtggtacgcgctgagcgcgggcggcaacgtggtcaacaaggtgatcctgagcgccttcccgttcccggtgaccgtgtcgctgtgccacatcctggctctgtgcgctgggctcccgccgctgctgcgcgcctggcgcgtgccccccgcgccgcccgtctcgggccccggacccagtccgcatccgtcgtccggcccgctgctgccgccgcgcttctacccgcgctacgtgctaccgctcgccttcggcaagtacttcgcgtccgtgtcagcgcacgtcagcatctggaaggtgcccgtgtcctatgcacacaccgtcaaggccaccatgcccatctgggtggtcctcctgtcccggatcattatgaaggagaagcagagcaccaaggtatacttgtcactcatccccatcatcagcggtgtcctgctggccaccgtcaccgagttgtcttttgacatgtggggactcgtcagcgccctcgccgccacgctgtgcttctcgcttcagaacattttctccaaaaaggtcttgcgagattcacggatccaccatctccggctgctcaacatcctgggctgccacgccgtcttctttatgatccccacctgggttctggtggacctctcggctttcctggtcagcagcgacttgacctacgtctaccagtggccctggacgctcctgctcctggctgtcagcggcttctgtaactttgcccagaatgttatcgccttcagcatcctcaacctcgttagccccctgagctactcggtcgccaatgccaccaaaagaatcatggtcatcacggtgtccctgatcatgctgcgcaacccagtcaccagcaccaacgtcctgggcatgatgaccgccatcctgggggtcttcctctataacaagaccaagtacgatgcaaaccagcaagccaggaagcacctcctccccgtcaccacagcagacctgagcagcaaggagcgtcaccggagcccactggagaagccccacaacggcctcctcttcccccagcacggggactatcagtacggccgcaacaacatcttaacagaccacttccaatacagccggcagagctacccaaactcgtacagtttgaaccgctatgatgtgtagagtccaaaggacaggaccagactgttggtgactccttccccggcccccacagcagtatcagaaacttctgacaatcagtgaatgtacaacccagccgaggggacggtgcataactctccatcagaagccctggggttcctggccccccgtgagccgcaggaggatgcgttgcctgcagtgcagacggccgtgagctctgggcaaacctaaacagagaccagtgtctcatgctctttcttcctggagtctgtcatctgagggccgtgtccctgcggagatcttggccacgttgtacctttccatgtggaattattccccaagcagtgtagctcagagcacttgtgtctgcattccagataacattcaggacctgtgtgaaaagctggggtcactgtggctgtagaccatgaactggcagtgggggtgtccagggcggtgcttgagaacgtcagactggctagtttaattccctggcgcagatacgcataggaccaacagggtcaccaagcagacagggagcccgcgagaatcattcaaaacatccccagccacagagatggatccagtttcctggtcatccccttagcagttcacaagttcctggcaaatgttccaaagcaaaaagcgattgcaattagcatccagttcctgcagcctggtgctctgccctgcacgtcagggttggcatccacccagatccagatggaagggaaacttctctcttctcctttgcctcctcttccctcaccagagcagggcgcttctcttggggtggtgagaaggatcttcgagaaatcgtgttcagtatttcaagctctatttctgtggcacatgtcttttgagaggcatcttcacctcttctgtgatgacttggtatgttgtttggtagagagatcttgattttcggaggatcttgcatttttctagggaatattttgtagttgtgtgtgtgtgtttttgccttggtccccattatgggatgcattaggactggcctatgcatcgaaaatctttttgtttgtaaacgttttaaaaacaaagttccccggccaggcacggtggctcacacctgtggtcccggcactttgggaggccaagatgggcggatcacgaggtcaggagttcgagaccagcctggccaacatagtgaaaccccatctctactaaaaatacagaaattagccgggcatggtgtcgcgtgcctgtagtcccagctcctcaggctgctgaggcaggcgaattgcttgaacctgggaggcagaagttgtggtgagccgagattgtgcactccagcctgggtaacagagcgagactccatctcaaaaaaaaaaacaaaacaaaaccaagttcccactggtgatgcctgtctgacacgttttggtatttagtaggaaatgaagtgtttcgaagcttcgagagaagcttcaaaattgtcacaattgctgaaaacagaatgaatcgtgaacattatctcaatattttgtataatagacaagaccacagtgttttggttccctgacctgtttttgtgtttatgttaggatctgaatcatgttctgggtaaggggacgaggagcgaacactgcactaagatttggtttgccaaatcagattctttggtcaagagtcagtttggggccaggcgtggtggctcatgcctgtaatctcagcactttgggaggctgaggtgggtggatcactggagtttgagaccaccctggccaacatggtgaaaccccatctctactaaaacaaaaattagccaggcatggtggcacctgcctgtaatcccagctacttgggaggctgaggcaggagaatcacttgagcccaggaggtggaggtttcagcgagctgagatcacaccactgcactccagccttggtgacagagtgagactctgtctcaaaaaaaaaaaaaaaaaaaaaaa

SEQ ID NO: 27918 - DNA, 1468 bp, Homo Sapiens
cgctcccgttgctaccggaatgcctcttcaggttagcgattacagctggcagcagacgaagactgcggtctttctgtctctgcccctcaaaggcgtgtgcgtcagagacacggacgtgttctgcacggaaaactatctgaaggtcaactttcctccatttttatttgaggcatttctttatgctcccatagacgatgagagcagcaaagcaaagattgggaatgacaccattgtcttcaccttgtataaaaaagaagcggccatgtgggagaccctttctgtgacgggtgttgacaaagagatgatgcaaagaattagagaaaaatctattttacaagcacaagagagagcaaaagaagctacagaagcaaaagctgcagcaaagcgggaagatcaaaaatacgcactaagtgtcatgatgaagattgaagaagaagagaggaaaaaaatagaagatatgaaagaaaatgaacggataaaagccactaaagcattggaagcctggaaagaatatcaaagaaaagctgaggagcaaaaaaaaattcagagagaagagaaattatgtcaaaaagaaaagcaaattaaagaaggaagaaaaaaaataaaatataagagtcttactagaaatttggcatctagaaatcttgctccaaaagggagaaattcagaaaatatatttactgagaagttaaaggaagacagtattcctgctcctcgctctgttggcagtattaaaatcaactttacccctcgagtattcccaacagctcttcgtgaatcacaagtagcagaagaggaggagtggctacacaaacaagctgaggcacgaagagcaatgaatactgacatagctgaactttgcgatttaaaagaagaagaaaagaacccagaatggttgaaggataaaggaaacaaattgtttgcaacggaaaactatttggcagctatcaatgcatataatttagccataagactaaataataagatgccactattgtatttgaaccgggctgtttgccacctaaaactaaaaaacttacacaaggctattgaagattcttctaaggaattctgttctcttgagggcattgaatgtcaggcctctgagcccaagctaagccatcatatccctagtgacctgcacgtatacatccagatggcctgaagcaagtgaagaatcacaaaagaagtgaaaatggccggttcctgccttaactgatgacattaccttgtgaaattccttctcctggctcagaacctcccccactgagcaccttgtgacccctgcccctgcccgccacagaataaccccctttgactgtaattttccattacctacccaaatcctataaaacggccccacccctatctcccttcgctgactgtcttttcggactcagcccgcctccacccaggtgattaaaaagctttattgctcccaaaaaaaaaaaaaaaaaaaaaaaaaaaa

SEQ ID NO: 27919 - DNA, 2580 bp, Homo Sapiens
ggtgcggggaggtcgcccccgggcggcgaagcggccattatgcaggccttgcattgaaaggctctagttacagtggacttcttgaacgacatcatattcacaccaaaaatgtagaacatattatagatagtttacggaatgagggaattgaggttcgtctagtaaagaggagagaatatgatgaagagactgttcgatgggcagatgctgtcatagctgcaggaggtgatggcacaatgctgctggcagcgagtaaagtcttggacagacttaaaccagttataggggtaaacactgatccagaacggtctgagggtcatttatgcctgcccgttcgatatacacattcctttccagaagccttacagaagttctatcgtggtgagttcaggtggttgtggaggcagagaatcaggttataccttgaagggactggcataaaccctgtacctgtggaccttcacgagcagcagctaagcttgaatcagcacaatagagcccttaacattgaaagagctcatgatgaaaggtctgaggcttcaggaccccaacttctgccagtgagagcactaaatgaagtcttcattggggagagtctgtcatccagggcttcctactatgagatttcagttgatgatggtccatgggaaaaacagaagagttcagggctcaatttgtgtactggaacaggatcaaaggcctggtcattcaatattaacagggttgcaactcaggctgtagaagatgttttaaatattgcaaaacgacaaggaaatttgagtcttccattgaacagagaattggtagagaaagtaacaaatgaatataatgaatcactgctctacagtccggaagaaccaaaaatacttttcagtattcgagaaccaatagcaaatagagttttctcaagcagtcgtcagcgttgtttctcctcaaaggtttgtgttcgttctcgttgttgggatgcctgtatggttgtggatggaggaacttcttttgagtttaatgatggtgcaattgcttcgatgatgatcaataaagaagatgagcttcgaactgtgcttcttgaacagtgaaggatttcctcatgacaaattttgattactggcgagaatatttttacttcagaaacagactaccagtcgtaaagtgacattttttggttattgttgagactgcttgcccgtgggctcagaagtgagatttgcattattcttctgttggattctgatagaaaaaaagacattcactgtataagaaaatggatggactgaaccaattagaattgataccagtgaaatttttatattgcttacaattggtaaccaagagtgctgatacctttttaaatttagaggggcaggcttaaataaaggactaaatatttaggatttgaaacttaactgtataagtgtgttttccttccctttcctcctaattgtgggattgtcagaactgaacacatatcatttgattagtgcatattttttatagtacctgaaaaccaagattttgaaaaaattttcaagacagagaattttgataaatcctgacattgacctaattgacataggtaaatatgtttgtatatgtgctaataattttctaatttcggaacacgatgatgttatgactattgatttaaaaatttcaaataataatttttgaaattatagatgaatgctttcatttgagtttcattctgtaattcagcagttctgggtgaaatacagatagcaaaacaaatcatgatgctgttacaaatgtattagttatccaataagtgttttaagtcaatttttttaaaatgatatgagtcttacaggtttcttccatctttaaaatgctcaaacatggattcagggactaaaaggatgaactgattagacattttctattaggagtttggtaaaatattgtaaaaatatcttcacctgtgttaggagtattatcagaaagaatggattctttaataaatatgtaaaacacagtagttttggaattgccttccttagtattgtggttttcacctagcttatattccaagatttacagaatagcttttaggataagatgttaggactttttttttttccccatgagaattcctttatttttggaggaaattattatctaattattgatctacttataagtaatcctagaatttttgccaaaagatcctgtcgttgcataatcaaacagttggtattctcgtgccgttgttcaaagtcatgtgtttctttcatttggtgctgaaaatttctgttcaatcattgacaaatatttattgaacacccactctgtgccatgtaaaactatgtcaggtgctggatatgttgatgaatgaaacagactctatccttatacaatttgagtcttgtgggctcagaagtaaattctgtgaaagctggacggatagtcgaattgagtgctcttagttttgccaatatttaacatgttgttcttatcaattttttaaaataaatgttaatgtacaaagttaaaaaaaaaaaaaaaaaaaaaaaaaaaaaaaaaaaaaaaaaaaaaaaaaaaaaaaaaaaaaaaaaaaaaaaaaaa

SEQ ID NO: 27920 - DNA, 1996 bp, Homo Sapiens
ggagatgctggcgagacgacagcgagatcctctccaggccctgcggcgccgcaatcaggagctgaagcaacaggttgatagtttgctttctgagagccaactgaaagaagctctagaacccaataaaagacaacatatttatcaaagagttggggcacctactgaagaagaggaagaaagtgaaagtgaagatagtgaagacagtggtggggaggaagaagatgcagaggaggaagaggaagagaaagaggaaaatgaatctcacaaatggtcaaccggtgaagaatacatcgctgttggagattttactgctcagcaagttggagatcttacatttaagaaaggggaaattctccttgtaattgaaaaaaaacctgatggttggtggatagctaaggatgccaaaggaaatgaaggtcttgttcccagaacctacctagagccttatagtgaagaagaagaaggccaagagtcaagtgaagagggcagtgaagaagatgtagaggcggtggatgaaacagcagatggagcagaagttaagcaaagaactgatccccactggagtgctgttcagaaagcgatttcagagataaacactgttgatgtgttaactacgatgggagctattcctgcagggttcaggccttccacgctctcacagcttctggaggaagggaatcaatttcgagcaaattacttcttacaaccagagctcatgccttcacaactggccttcagagatctgatgtgggatgctacagaaggcactattaggtcgagaccaagtcgtatttcattgattctgacattatggagctgtaaaatgattcctcttccaggaatgagcatacaggttctcagcagacatgtacgcctctgtctatttgatggtaataaggttctgagcaacattcatacagtcagagccacatggcaacctaaaaagcccaaaacatggaccttttctccccaggttactcgcatcttaccatgtttgcttgatggtgattgctttatcaggtctaattctgcatctccagatcttggaatattatttgaacttggaatttcttatattcgcaattcaactggtgaaagaggagagttaagctgtggctgggtgtttcttaaactttttgatgccagtggagttcctattccagcaaaaacttatgagcttttcttgaatggtggtactccttatgaaaaaggtattgaagtggacccttcaatatccagaagagcacacggcagtgttttctaccagattatgacaatgagaaggcagcctcaacttctagtgaaactgagatccttgaacagaagatcaagaaatgtactaagtctactgccagaaacattaattggaaatatgtgttctattcacttgttgatattttatcgacaaattcttggagatgtgctcctgaaagacaggatgagcttgcaaagtactgatttaattagccatcccatgctggccaccttccccatgctcttggagcagcctgatgtgatggatgctctcaggagttcgtgggctggaaaagaaagcacattaaaaagatcagagaagagagacaaagagttcctgaagtccacgtttctcctggtttaccatgactgcgtgctcccacttctccactccacacgcctacccccattcaggtgggcagaagaagagactgagactgcacggtggaaagttatcactgacttccttaagcaaaaccaagaaaaccagggcgccctccaagctctgctgtcaccagacggagttcatgaaccttttgacctttcagagcagacctatgacttcttgggtgaaatgagaaagaatgcagtgtgacagtggcagcctctagccctcagcttcccacggaatcagatggatcctccacgattacgtgaataaaatgatggaaccaaaaaaaaaaaaaaaaaaaaaaaaaaaaaaaaaaaaaaaaaaaaaaaaaaaaaaaaaaaaaaaaaaaaa

SEQ ID NO: 27921 - DNA, 1930 bp, Homo Sapiens
cttggaaaatgagaaagatttagcaaaattccaccgtatcttttgccaggctagagacagggagagcagagtaaaaccctcaggctgctgaaatttctaggctgttaggaagcccctcgaattctgtgaaaatgagggtttcttaactcacactgagagcggaaaggggcagacccttttcataactccctcaagtgtgtgttacctttctttaccagcatggtaagcaacaggacatatcccagcctcggacatgtctgtatgatccaaggtacccaaagtcagacagagtaaactcaagcctggcactggctttctgccgcttcatgtgctttggaaaaagcaggagaagcaatagcagcaggagtccccagcagctggagccgcaagaatgaactgcaaagagggaactgacagcagctgcggctgcaggggcaacgacgagaagaagatgttgaagtgtgtggtggtgggggacggtgccgtggggaaaacctgcctgctgatgagctacgccaacgacgccttcccagaggaatacgtgcccactgtgtttgaccactatgcagttactgtgactgtgggaggcaagcaacacttgctcggactgtatgacaccgcgggacaggaggactacaaccagctgaggccactctcctaccccaacacggatgtgtttttgatctgcttctctgtcgtaaaccctgcctcttaccacaatgtccaggaggaatgggtccccgagctcaaggactgcatgcctcacgtgccttatgtcctcatagggacccagattgatctccgtgatgacccaaaaaccttggcccgtttgctgtatatgaaagagaaacctctcacttacgagcatggtgtgaagctcgcaaaagcgatcggagcacagtgctacttggaatgttcagctctgactcagaaaggtctcaaagcggtttttgatgaagcaatcctcaccattttccaccccaagaaaaagaagaaacgctgttctgagggtcacagctgctgttcaattatctgaggttgtctgggacctgcctccaccccatccagggatgagaatggcagccaatctctgtggccaagctccagccaaaaaggagggcacgaccagaaaggaactccctttgcacggaggcttgccccatcaccctctgagccctcccaacacagcacactagtcagcccactgccacgacctccctgccagccagaagcatccgtactgcacgctgtctgagaatgctgggcctggattgcagacagtgccgctgctgatcgcatcaaaaacaaagtcaaaggccatctcacattttacaaatccccagctcatgaacgtgaagctgataggaaatcaccccagggaacccgaaaaagaaacttgattcctctattgctggccttacttgatgtcttttataaaacttgggactacaatactaacctttttttctgaatctgctgttctacccatgtgtctcacattcatttgtattatttcaagaaatgtactaatttccagttcactcaggccttactaatccataccaaattagcctaaagacaaggcattttatattcatttctattttcagcatgtttctaccaaagctattagaaccaacacgtacctctgaatgcccgattataagaagacatgagaagactttaaaagttttggaaatttacagagccatgatttttgaacctaattgaaagaaaaccatctgaattgttgcaggtccacatttttgccaaagatacactctatagatgcttagtagtggcctgatttttttccatgtattgccacgacaaactaaaaatgaactgtgtttaaaaaaaaaaaaaaaaaaaaaaaaaaaaaaaaaaaaaaaaaaaaaaaaaaaaaaaaaaaaaaaaaaaaaaaaaaaaa

SEQ ID NO: 27922 - DNA, 4270 bp, Homo Sapiens
gggattgttcattgctgctggaggaagatcatggactgtcgcgggaaactgaagtggttgagtatccactagtcgtggatgagggcagtgacttcgcagttttttgcgaattacacatctctttgattatgttgtgactagttttgttagatagtcatttagtgtttgggatacctgttaagccctttgtccagggactgtggttggatttatgaattatttggacggttgtccacttgaaagaactgacagtagcttcataacaatgttacaaatctcgttctaagattaagctgttgaacctatatttgccattagcgcttaatttttgaagtattatttttatgaatcaagccctggaaaaggacaagatatttgaatgaaatagcacccataatggagaacttcacagttgctactcctgtgataggtttatcttagtttcattgtggtataaatggaatagcaggtgttgtcaggtacaaggtttgtagcttgccaatatgttcattaccaacactgcagattcccattgagttggtgggggttttgttacctttgttttttttctcagcaaaataattctataactttttgtttgtgacaagaaatggactttcagtttacttaagattaatacttcttgaatgataaaatcattttgccatgttagaagacatttccgaagaagacatttgggaatacaaatctaaaagaaaaccaaaacgagttgatccaaataatggctctaaaaatattctaaaatctgttgaaaaagcaacagatggaaaataccagtcaaaacggagtagaaacagaaaaagagccgcagaagctaaagaggtgaaggaccatgaagtgccccttggaaatgcaggttgtcagacttctgttgcttctagtcagaattcaagttgtggagatggtattcagcagacccaagacaaggaaactactccaggaaaactctgtagaactcaaaaaagccaacacgtgtccccaaagatacgtccagtttatgatggatactgtccaaattgccagatgcctttttcctcattgatagggcagacacctcgatggcatgtttttgaatgtttggattctccaccacgctctgaaacagagtgtcctgatggtcttctgtgtacctcaaccattccttttcattacaagagatacactcacttcctgctagctcaaagcagggctggtgatcatccttttagcagcccatcacctgcgtcaggtggcagtttcagtgagactaagtcaggcgtcctttgtagccttgaggaaagatggtcttcgtatcagaaccaaactgataactcggtttcaaatgatcccttattgatgacacagtattttaaaaagtctccgtctctgactgaagccagtgaaaagatttctactcatatccaaacatcccaacaagctctacaatttacagattttgttgagaatgacaaactagtgggagttgctttgcgtcttgcaaacaactcagaacacataaatttgccattgccagaaaatgacttcagtgactgtgaaatctcctattctccacttcaaagtgatgaagacactcatgatatcgatgaaaaaccgcatgattcacaagaacaactgttttttaccgaaagctcaaaagatggcagcctcgaagaagatgatgacagctgtggtttttttaaaaaacgacatggtcccttactgaaggaccaggatgagagctgccccaaagtgaacagcttcttaactcgggataagtatgatgaaggattgtatagattcaatagtctaaatgatttgtctcaacctatttctcaaaataatgagagtactttgccttatgatctggcatgtactggtggtgattttgtgttgtttccacctgcattggcagggaagcttgctgcttctgttcatcaggcaactaaagcaaaacctgatgagccagaatttcactcagctcaatcaaataaacagaaacaggtaattgaagaatcatctgtttacaatcaagtttctcttccgttagttaagagtttaatgttgaaaccttttgaaagtcaggtagaagggtatctttcttcccaaccaacccaaaatacaattagaaaattatcaagtgagaacttgaatgctaagaataatactaactcagcatgtttctgcagaaaggcattagagggtgtgccagttggtaaagctacaattttaaatacagaaaacttgtctagtacacctgctccgaagtatttgaaaatattgccttctggtcttaagtataatgcaagacatccttctaccaaggtaatgaagcaaatggatataggtgtgtattttggactacctcccaaaagaaaggaagagaaattgctaggggaaagtgcattagaatggataaacttaaatccagttccaagtcctaatcaaaagaggtcctcgcagtgcaagaggaaagcagaaaaatctttaagtgatttagaatttgatgcaagtactttacatgagagtcagctttctgtggaactttctagtgagaggtcacagcgtcaaaaaaagagatgtagaaagtcaaattcactgcaggaaggagcgtgtcagaagagatcagatcaccttattaatacagaatctgaagcagtcaatttaagtaaagtcaaagtcttcacaaaatcagctcatggtgggctgcaaaggggcaacaagaaaatcccagagtcatctaatgtaggaggatcaagaaaaaagacatgtccattctataagaaaatacctggaaccggctttacagttgatgcctttcagtatggcgtggttgaaggttgcacagcctattttctcacacattttcattctgatcattatgctggattgtctaaacacttcacatttccagtttattgtagtgagataactggcaatttgttgaagaacaagcttcatgtgcaagaacaatatattcacccattgccactggacactgaatgtattgtgaatggtgtcaaagttgttttgcttgatgccaatcactgtccaggtgctgtcatgatcctcttttatcttcctaatggtactgtcatattacacacgggagacttcagagcagatcccagcatggaacgttctcttcttgcggaccagaaagtccatatgctgtacttagataccacatattgtagcccagaatacacctttccatctcagcaagaggttatccggtttgccatcaacactgcctttgaggctgtaactctaaacccacatgctcttgttgtctgtggcacttactctattggaaaagagaaagtcttcctagccattgctgatgttttaggttcaaaagtgggcatgtcccaggaaaaatataaaactctacagtgcctcaatataccagaaattaattcactcatcactaccgacatgtgcagttcattggttcaccttctcccaatgatgcaaattaattttaagggcttacagagtcatttgaagaagtgtggtgggaaatacaatcagattttggcatttcgacctacaggatggacacactctaacaagttcactagaatagcagatgttattccccagaccaaaggaaacatttcaatatatggaattccttacagtgaacacagcagctacctagaaatgaagcgctttgtccagtggctgaagccccagaaaatcatacctactgtaaatgtgggcacctggaaatctaggagcacaatggagaaatattttagagagtggaaattggaagctggatattgatgatacctccgaggattcagtagtagttaagttccttggatgtagcttgttagtagttaaatctatagaaatgtgaaatacactttgtgtggaaaaacctcatgaagattgttcagatactttattttctcatttatgtttgaacaacatgttcgtggtgctgaatgcctctcagcatcatcaaggataactgaaactgggtctccctgggacccttaatttcttgtcccctgccctccatgggcagttatattctgcatcaagccttagaagaggaagcaaaggcagattcagggaccaaaaggattaatgataattaataaagtagtttgaagcattatatatataagtaattatgtgtctttaaaattatgagatgaaacttttatatgacgtgtatacttaaataaaattaatataaaatttgaaaaaaaaaaaaaaaaaaaaaaaaaaaaaaaaaaaaaaaaaaaaaaaaaaaaaa

SEQ ID NO: 27923 - DNA, 2030 bp, Homo Sapiens
cagacaagagaacaagaggctgccgaagacaaaacttctctgcaagcacctgtgcacagcaatgtgcgtgggcatctgtgagaagaagagaatctgtgaagtttgagcaagcggccttcccaagatgtaccgaatatctcaactgatgtcaacaccagtagcaagttcttccaggttggaaagagaatatgctggagagctgtctcccacgtgcattttcccaagtttcacctgtgattccctggatggttaccattcttttgaatgcggctccatagatcccctgacaggctcccactatacctgtcgccgaagtcccagactcctcaccaatggctactatatttggactgaagacagcttcctgtgcgacaaagatggcaacataactctgaacccatcccagaccagcgttatgtataaggagaacttagttagtacctccaaatcttggctgcatggaagtatctttggtgacatcaactcttctccaagtgaagacaactggttgaaggggaccaggaggttggacacagaccattgcaatggaaatgcagatgatttagactgttcttctctgactgatgactgggagtcagggaagatgaatgcagagtctgtgatcacctcctcttccagccacatcatatctcagcctcctggaggaaactcccatagcttgtctcttcagtcccagttgacagcttctgaacgtttccaagagaatagttcggatcattcagaaaccaggttgttgcaagaggtcttctttcaggcaatcctgcttgctgtgtgcttaatcatttctgcatgtgcaagatggtttatgggagaaatattagccagtgtcttcacatgctcattgatgataactgtagcttatgtgaaatcattgtttctcagccttgccagctatttcaaaaccactgcctgtgctcggtttgtcaaaatttgacaaccatttaggaatgccttcgatgaatgtcctccatctgaatatctggaaattgtccaacttgcagtctacttggaatcaagtgttttattggaagggagtaagcgagtaatggagaaaaagccattttagtttgactatgtgattttaaaatgatctcagtttttccatcaaaattataatatgctcatgaaaataatattaatttgccttccctttgcaaacaccggcagttgaaaggaaaaggacggggaatgtgatggaaaagagaccgcctggaataaatgtccccctatgattctttaaggcagtggttctcgagcttgaattttcattaggaaattctgtgaggagcttgtaaccagatttctgggtctgccacatgcacctatctcttgctgaattgctttaatagaataatgagagcaagtttgtctaactaataccaacctgacaacttgaataacaataaatgcaatttgtacataaaatataatgctgcaaaagtttgtcattcacctcagtggagtgacttgatattaggtggtaaccgtagatgatggttaatatgaaaatggacaggaaagaagcattttctgaaagttatattcttttgaaccacgttctaaaccaagtttttaatcttcttggggctcgtaattacctttcactttaatgtcacttaaagatataacacagaaaaatgccttgagggcaaaatataggcaaaacaccaatgcgctttcaaatgcatgaaaatggtgcagttgtacccttgagccttgactcaagggctgtagatgttccctttccaccccccacacttggtgcgtgttcacaaagcaaatatggcctgtaattcaaatttgttctatgtgatactctctgagtaaaaactcatacatgcagaaaattgtctttgctcgaaatgataatgccaaaatataactttatatataatttgcatttagtacatttttggttaaaaaataaactaataaataagtgaagtcatcagcaaaaaaaaaaaaaaaaaaaaaaaaaaaaaaaaaaaaaaaaaaaaaaaaaaaaaaaa

SEQ ID NO: 27924 - DNA, 3506 bp, Homo Sapiens
cggccgctgccattgcccggagatggccggcagagccgccgagacgccgaagagcccgccgcccgcgcgaggtgtagacggggcactgccttcagagcaggtcctgccagcctcgctggagaggatgccctcgtgtccgtgatgggctgtgggacaagcaaggtccttcccgagccacccaaggatgtccagctggatctggtcaagaaggtggagcccttcagtggcactaagagtgacgtgtacaagcacttcatcacagaggtggacagtgttggccctgtcaaagccgggttcccagcagcaagtcagtatgcacacccctgccccggtcccccgactgctggccacacggagcctccctcagaaccaccacgcagggccagggtagctaagtacagggccaagtttgacccacgtgttacagctaagtatgacatcaaggccctaattggccgaggcagcttcagccgagtggtacgtgtagagcaccgggcaacccggcagccgtatgccatcaagatgattgagaccaagtaccgggaggggcgggaggtgtgtgagtcggagctgcgtgtgctgcgtcgggtgcgtcatgccaacatcatccagctggtggaggtgttcgagacacaggagcgggtgtacatggtgatggagctggccactggtggagagctctttgaccgcatcattgccaagggctccttcaccgagcgtgacgccacgcgggtgctgcagatggtgctggatggcgtccggtatctgcatgcactgggcatcacacaccgagacctcaaacctgagaatctgctctactaccatccgggcactgactccaagatcatcatcaccgacttcggcctggccagtgctcgcaagaagggtgatgactgcttgatgaagaccacctgtggcacgcctgagtacattgccccagaagtcctggtccgcaagccatacaccaactcagtggacatgtgggcgctgggcgtcattgcctacatcctactcagtggcaccatgccgtttgaggatgacaaccgtacccggctgtaccggcagatcctcaggggcaagtacagttactctggggagccctggcctagtgtgtccaacctggccaaggacttcattgaccgcctgctgacagtggaccctggagcccgtatgactgcactgcaggccctgaggcacccgtgggtggtgagcatggctgcctcttcatccatgaagaacctgcaccgctccatatcccagaacctccttaaacgtgcctcctcgcgctgccagagcaccaaatctgcccagtccacgcgttccagccgctccacacgctccaataagtcacgccgtgtgcgggaacgggagctgcgggagctcaacctgcgctaccagcagcaatacaatggctgagccgcctggctgtgcacacatgcagcacgacccagcctggccacacactgtggtgccatctgggtccgatgccctctctggagataggcctatgtggcccacagtaggtgaagaatgtctggctccagccctttctctgtgccttcagcagcccctgtcctcaccatgggcctgggccaggtgtgacagagtagaggtagcacagggggctgtgactccccctgaactgggagcctggcctggcactgatacccctcttggtgggcagctgctctggtggagttgggaagggataggacctggccttcactgtctcccttgccctttgacttttccccaatcaaagggaactgcagtgctgggtggagtgtcctgtggcctcaggaccctttgggacagttacttctgggaccccctttcctccacagagcccttctccctggtttcacacattcccatgcatcctgatccttaagattatgctccagtgggagaccctggtaggcacaaagcttgtgccttgactggacccgtagcccctggctaggtcgaaacagccctccacctcccagccaagatctgtcttccttcatggtgcctccagggagccttcctggtcccaggacctctggtggagggccatggcgtggaccttcacccttctggactgtgtggccatgctggtcatcggcttgcccaggctccagcctctccagattctgaggggtctcagcccaccgcccttggtgccttctttgtagagcccaccgctacctccctctccccgttggatgtccattccattccccaggtgcctccttcccaactgggggtggttaaagggagccccactgctgctacctggggaatggggcacctgggggccaaggcagagggaagggggtcctcccgattagggtcgagtgtcagcctgggttctatcctttggtgcagccccattgccttttcccttcaggctctgttgctccctcctctgcagctgcacgaaggcgccatctggtgtctgcatgggtgttggcagcctgggagtgatcactgcacgcccatcgtgcacacctgcccatcgtgcacacccacccatggtgcacacctgtagtcctccatgaggacatgggaaggtaggagttgccgccctgggggagggtcccgggctgctcacctctccccttctgctgagcttctgcgcacccctccctggaacttagccatactgtgtgacctgcctctgaaaccagggtgccaggggcactgccttctcacagctggccttgccccgtccaccctgtgctgcttcccttcacagcattaaccttccagtctgggtcccactgagcctcaagctggaaggagcccctgcgggaggtgggtggggttgggtggctgctttcccagaggcctgagccagaaccatccccatttcttttgtggtatctccccctaccacaaaccaggctggaacccaagccccttcctccacagctgccttcagtgggtagaatggggccagggcccagctttggccttagcttgacggcagggcccctgccattgcaggagggtttggttcccactcagcttctgccggtcggcagcctgggccaggcccttttcctgcatgtgccacctccagtgggaaacaaaactaaagagaccactctgtgccaagtcgactatgccttagacacatcctcctaccgtccccaatgccccctgggcaggaggcagtggagaaccaagccccatggcctcagaatttccccccagttccccaagtgtctctggggacctgaagccctggggcttacgttctctcttgcccagggtgggcctggtcctgagggcaggacagggggtttggagatgtgggcctttgatagacccacttgggccttcatgccatggcctgtggatggagaatgtgcagttatttattatgcgtattcagtttgtaaacgtatcctctgtattcagtaaacaggctgcctctccagggagggctgccattcattccaaaaaaaaaaaaaaaaaaaaaaaaaaaaaaaaaaaaaaaaaaaaaaaaaaaaaaaaaa

SEQ ID NO: 27925 - DNA, 2536 bp, Homo Sapiens
ccggctcaggtgctggcgttccgcgcggcgccgcctctgctgcgggccgggggagccagacgaggtgctgccgggtaggaaaaaatccagggctcattcataccccaggtcacgattccggggtcgcccccagcacttctccgccgggtgcatcaacctgaaaaagccccttcttcctggaaaccctccttctccagcgtttcaacggggaaactgatcagctgacaccagccccagtcctgcgaggggccggcgacctttgacctttctccaaaggggaccacctggcttcatgtgtggatttccatggctcttgcccagaggcgggtacactgtgttccaatgtgccacggaactcacgcagtggcactttgtggcttcatgaaggaagaggcaggccacgcaacacttcctccccaagccaaggagaagtatcacttttagaggcagaggagcggaaggcagtgggtgtgaccaaaagtgccatttgttaaagactgttggagcagaactactgagaaaaaccaggcattgtatcttcagttgtcatcaagttcgcaatcagattggaaaagctcaacttgaagctttcttgcctgcagtgaagcagagagatagatattattcacgtaataaaaaacatgggcttcaacctgactttccacctttcctacaaattccgattactgttgctgttgactttgtgcctgacagtggttgggtgggccaccagtaactacttcgtgggtgccattcaagagattcctaaagcaaaggagttcatggctaatttccataagaccctcattttggggaagggaaaaactctgactaatgaagcatccacgaagaaggtagaacttgacaactgcccttctgtgtctccttacctcagaggccagagcaagctcattttcaaaccagatctcactttggaagaggtacaggcagaaaatcccaaagtgtccagaggccggtatcgccctgaggaatgtaaagctttacagagggtcgccatcctcgttccccaccggaacagagagaaacacctgatgtacctgctggaacatctgcatcccttcctgcagaggcagcagctggattatggcatctacgtcatccaccaggctgaaggtaaaaagtttaatcgagccaaactcttgaatgtgggctatctagaagccctcaaggaagaaaattgggactgctttatattccacgatgtggacctggtacccgagaatgactttaacctttacaagtgtgaggagcatcccaagcatctggtggttggcaggaacagcactgggtacaggttacgttacagtggatattttgggggtgttactgccctaagcagagagcagtttttcaaggtgaatggattctctaacaactactggggatggggaggcgaagacgatgacctcagactcagggttgagctccaaagaatgaaaatttcccggcccctgcctgaagtgggtaaatatacaatggtcttccacactagagacaaaggcaatgaggtgaacgcagaacggatgaagctcttacaccaagtgtcacgagtctggagaacagatgggttgagtagttgttcttataaattagtatctgtggaacacaatcctttatatatcaacatcacagtggatttctggtttggtgcatgaccctggatcttttggtgatgtttggaagaactgattctttgtttgcaataattttggcctagagacttcaaatagtagcacacattaagaacctgttacagctcattgttgagctgaatttttcctttttgtattttcttagcagagctcctggtgatgtagagtataaaacagttgtaacaagacagctttcttagtcattttgatcatgagggttaaatattgtaatatggatacttgaaggactttatataaaaggatgactcaaaggataaaatgaacgctatttgaggactctggttgaaggagatttatttaaatttgaagtaatatattatgggataaaaggccacaggaaataagactgctgaatgtctgagagaaccagagttgttctcgtccaaggtagaaaggtacgaagatacaatactgttattcatttatcctgtacaatcatctgtgaagtggtggtgtcaggtgagaaggcgtccacaaaagaggggagaaaaggcgacgaatcaggacacagtgaacttgggaatgaagaggtagcaggagggtggagtgtcggctgcaaaggcagcagtagctgagctggttgcagctgctgatagccttcaggggaggacctgcccaggtatgccttccagtgatgcccaccagagaatacattctctattagtttttaaagagtttttgtaaaatgattttgtacaagtaggatatgaattagcagtttacaagtttacatattaactaataataaatatgtctatcaaatacctctgtagtaaaatgtgaaaaagcaaaaaaaaaaaaaaaaaaaaaaaaaaaaaaaaaaaaaaaaaaaaaaaaaaaaa

SEQ ID NO: 27926 - DNA, 1675 bp, Homo Sapiens
ctgagtagctgggattacgggcacctgccaccacacccagctaatttctgtatttttacaaaatttggactctgcttagattggcttagttttctctttagtcaaatcttcaggaaccaatttattaccattaaaaatgatctaacaagctttatttttattattgttaaaaatcctcattttgaggaacacaaccacaaagtaaagaatgttttcattgatttaaccagtaaaaatcaatatttaattataaaattttttttttcttcagctaaaacagcggaagaggtgatttattatatggttgttacactcggccacaaataaacacagaaatagtccagaatgtcacaggtccagggcagaggaccaacatgggcattttgtttatgagcaaggtgggtctcagaggtgatcggcgatcagagggcgatgaagttctagatccattgagacaagctctagacagtagcatgcagtcccacaacttgtaccagcatccccagcatctggcattccatgtttctgctcctgtggcctccacagtgcaacaagctagcggtttacttggacctctacctcatctttcttcttttgcgcttcagcctgcgcattcgcttcttcctccacttggctctcatggtgcaggtttccaagaaaatggcgctaaggccgagagttaataataaaatatttaaaacatggctccaggccatccagatgccttaacttgggctcaggctcctgatactgatgggtcttttatcttcctctgatgccttttctgtgaattcacctgttttggaagaaaacacaattaaggttatctatcacaacaaccactatctccaatgtgtattcattccttttattcattttaagtctcatctacctgatgagataacttttttgaagacaggcattatatgctgtttaacagtactttgattcttccacagttcagtcatccttgctaccttgcagaggactggttctaggatatcgcccccacaccataccagaatctgtggatgctcaatcccttaaatataatggtgcagtgtttgcatataaccaacacccccgcccccatatacttatttatttacttacttagagacaggatcaccctctgtcactcaggctggagaacagtgtcacaatcacggctcgctgcagcctcaacttcctgggctccagtgatctgcccacctcagcctcttgagtagctgggactacaggtgcataccaccacacctggctaatttttttatttttatttttattagagacaaggtctcactatgctgcccaggttggcctcccaaagtgttgggattacaagtgtgagtcaccgtgcctggtcccatgtacttgaagtcatcactaacaaaatgtatagatattgtataatggcaacagttgttatactgtactttctatttgtatttttattttttctttcttcaaatattcagcctcatctagttgaatctgaagatgtggacctgctgatgaagagggctgattgtatctaacttagggtcttgcatgcagctggcacttaatgcattttattgactgttttagctaacattcaatggacaattcctaataaaaaactccactcccaaaagtaaaaaaaaaaaaaaaaaaaaaaaaaaaaaaaaaaaaa

SEQ ID NO: 27927 - DNA, 1511 bp, Homo Sapiens
ggggacccgcgggtttgctatggcgatgagcagcggcggcagtggtggcggcgtcccggagcaggaggattccgtgctgttccggcgcggcacaggccagagcgatgattctgacatttgggatgatacagcactgataaaagcatatgataaagctgtggcttcatttaagcatgctctaaagaatggtgacatttgtgaaacttcgggtaaaccaaaaaccacacctaaaagaaaacctgctaagaagaataaaagccaaaagaagaatactgcagcttccttacaacagtggaaagttggggacaaatgttctgccatttggtcagaagacggttgcatttacccagctaccattgcttcaattgattttaagagagaaacctgtgttgtggtttacactggatatggaaatagagaggagcaaaatctgtccgatctactttccccaatctgtgaagtagctaataatatagaacaaaatgctcaagagaatgaaaatgaaagccaagtttcaacagatgaaagtgagaactccaggtctcctggaaataaatcagataacatcaagcccaaatctgctccatggaactcttttctccctccaccaccccccatgccagggccaagactgggaccaggaaagccaggtctaaaattcaatggcccaccaccgccaccgccaccaccaccaccccacttactatcatgctggctgcctccatttccttctggaccaccaataattcccccaccacctcccatatgtccagattctcttgatgatgctgatgctttgggaagtatgttaatttcatggtacatgagtggctatcatactggctattatatgggtttcagacaaaatcaaaaagaaggaaggtgctcacattccttaaattaaggagaaatgctggcatagagcagcactaaatgacaccactaaagaaacgatcagacagatctggaatgtgaagcgttatagaagataactggcctcatttcttcaaaatatcaagtgttgggaaagaaaaaaggaagtggaatgggtaactcttcttgattaaaagttatgtaataaccaaatgcaatgtgaaatattttactggactctattttgaaaaaccatctgtaaaagactggggtgggggtgggaggccagcacggtggtgaggcagttgagaaaatttgaatgtggattagattttgaatgatattggataattattggtaatttttatgagctgtgagaagggtgttgtagtttataaaagactgtcttaatttgcatacttaagcatttaggaatgaagtgttagagtgtcttaaaatgtttcaaatggtttaacaaaatgtatgtgaggcgtatgtggcaaaatgttacagaatctaactggtggacatggctgttcattgtactgtttttttctatcttctatatgtttaaaagtatataataaaaatatttaatttttttttaaaaaaaaaaaaaaaaaaacaaaaaaaaaaaa

SEQ ID NO: 27928 - DNA, 739 bp, Homo Sapiens
ggggactgcacatcctgggcttgcggcgcagtgtagacctgggaggatgggcggcctgctgctggctgcttttctggctttggtctcggtgcccagggcccaggccgtgtggttgggaagactggaccctgagcagcttcttgggccctggtacgtgcttgcggtggcctcccgggaaaagggctttgccatggagaaggacatgaagaacgtcgtgggggtggtggtgaccctcactccagaaaacaacctgcggacgctgtcctctcagcacgggctgggagggtgtgaccagagtgtcatggacctgataaagcgaaactccggatgggtgtttgagaatccctcaataggcgtgctggagctctgggtgctggccaccaacttcagagactatgccatcatcttcactcagctggagttcggggacgagcccttcaacaccgtggagctgtacagtctgactgagacagccagccaggaggccatggggctcttcaccaagtggagcaggagcctgggcttcctgtcacagtagcaggcccagctgcagaaggacctcacctgtgctcacaagatccttctgtgagtgctgcgtccccagtagggatggcgcccacagggtcctgtgacctcggccagtgtccacccacctcgctcagcggctcccggggcccagcaccagctcagaataaagcgattccacaccaaaaaaaaaaaaaaaaaaaaaaaaaaaaaa

SEQ ID NO: 27929 - DNA, 1054 bp, Homo Sapiens
gggggggcaaaaaaaaatcaaggtatttggtcccggaacaaagcttatcattacagataaacaacttgatgcagatgtttcccccaagcccactatttttcttccttcaattgctgaaacaaagctccagaaggctggaacatacctttgtcttcttgagaaatttttccctgatgttattaagatacattggcaagaaaagaagagcaacacgattctgggatcccaggaggggaacaccatgaagactaacgacacatacatgaaatttagctggttaacggtgccagaaaagtcactggacaaagaacacagatgtatcgtcagacatgagaataataaaaacggagttgatcaagaaattatctttcctccaataaagacagatgtcatcacagtggatcccaaagacaattgttcaaaagatgcaaatgatacactactgctgcagctcacaaacacctctgcatattacatgtacctcctcctgctcctcaagagtgtggtctattttgccatcatcacctgctgtctgcttagaagaacggctttctgctgcaatggagagaaatcataacagacggtggcacaaggaggccatcttttcctcatcggttattgtccctagaagcgtcttctgaggatctagttgggctttctttctgggtttgggccatttcagttctcatgtgtgtactattctatcattattgtataacggttttcaaaccagtgggcacacagagaacctcactctgtaataacaatgaggaatagccacggcgatctccagcaccaatctctccatgttttccacagctcctccagccaacccaaatagcgcctgctatagtgtagacatcctgcggcttctagccttgtccctctcttagtgttctttaatcagataactgcctggaagcctttcattttacacgccctgaagcagtcttctttgctagttgaattatgtggtgtgtttttccgtaataagcaaaataaatttaaaaaaatgaaaagttggaaaaaaaaaaaaaaaaaaaaaaaaaaaaaa

SEQ ID NO: 27930 - DNA, 1200 bp, Homo Sapiens
agctttccgggaacatccaaggcaagactggcacccagcacagcagtgactgaccacataccccactctccaggacccatggagtccttcagctcaaagagcctggcactgcaagcagagaagaagctactgagtaagatggcgggtcgctctgtggctcatctcttcatagatgagacaagcagtgaggtgctagatgagctctaccgtgtgtccaaggagtacacgcacagccggccccaggcccagcgcgtgatcaaggacctgatcaaagtggccatcaaggtggctgtgctgcaccgcaatggctcctttggccccagtgagctggccctggctacccgctttcgccagaagctgcggcagggtgccatgacggcacttagctttggtgaggtagacttcaccttcgaggctgctgttctggctggcctgctgaccgagtgccgggatgtgctgctagagttggtggaacaccacctcacgcccaagtcacatggccgcatccgccacgtgtttgatcacttctctgacccaggtctgctcacggccctctatgggcctgacttcactcagcaccttggcaagatctgtgacggactcaggaagctgctagacgaagggaagctctgagagccctgagcctagcacattccaccttgacaaaatggttgactgagaaaacacagataatgggcttcctaaccctgctcacctggcactaacacttttcaatcttcaggcttcattccttcccaagagtgcttttgactctgagaccagcccacccccaaacagctagtggagaaggagcaatgctgaggggtgaggcctctctcccactccagccccaggacaggaaacagaactgcctgaaaaaggtgaagtgaaacttggatctctatttctcccataagggacttctgaaacagggaagccccctcccatgtgaaccaaggaaaggaggcacagcccagagaacccctttggggatactaaagacagaagaggggaaggtggcccttagagacagagcttggacagatgccagaggctctgttccagagtgcaggaagaaggggctagggcaggggagattctcataggggaaataaaactactaaaatatgaaaaaaaaaaaaaaaaaaaaaaaaaaaaaaaaaaaaaaaaaaaaaaaaaaaaaaaaaaaaaaaaaaaaaa

SEQ ID NO: 27931 - DNA, 3787 bp, Homo Sapiens
gcgggaagcagctcttgtggatcctcagtggcggaggctcggtcacccggataggtaaaggaaaacatgcctgccacacggaagccaatgagatatgggcatacagagggacacacggaggtctgttttgatgattctgggagttttattgtgacttgtggaagtgatggtgatgtgaggatttgggaagacttggatgatgatgatcctaagttcattaatgttggagaaaaggcatattcatgtgctttgaagagtggaaaactggtcactgcagtttctaataatactattcaagtccacacatttcctgaaggagttccagatggtatattgactcgcttcactacaaatgcaaaccatgtggtctttaatggggatggtactaaaattgctgctggatctagtgattttctagtcaaaattgtggatgtgatggatagcagccaacagaaaacatttcgaggacatgatgcccctgttttaagtctttcctttgatcctaaggacatctttctggcatcagctagttgtgatggatctgtcagagtgtggcaaatttcagatcagacatgtgctattagttggccactgctacaaaaatgcaacgatgtgataaatgcaaaatcaatctgcagacttgcttggcagccaaaaagtgggaagttactggcaattcctgtggaaaaatctgttaagctatatagaagagaatcttggagtcatcaatttgatctttcagataatttcatctctcagaccctcaatatagtaacctggtctccctgtgggcaatatttagctgcaggtagtattaatggtctaatcatagtttggaatgtggaaaccaaagactgcatggaaagggtgaaacatgagaaaggttatgcaatttgtggtctggcatggcatcctacttgtggtcgaatatcgtatactgatgcggaaggaaatctagggcttctagagaatgtttgtgaccccagtggaaagacatcaagcagtaaggtatctagcagagtggaaaaggattataatgatctttttgatggagatgatatgagtaatgctggtgattttctaaatgacaatgcagttgagatcccttctttttcaaaagggattataaatgatgatgaggatgatgaagacctcatgatggcttcaggtcgtcctagacagcgaagtcacatcctagaagatgatgaaaactcagttgatatttcaatgctaaaaactggttctagtcttctcaaagaggaggaggaagatggtcaagaaggcagcattcacaatctaccacttgtaacatcccaaaggccattttatgatggacccatgccaactccccggcaaaagccatttcagtcaggttctacaccgttgcatctcactcacagattcatggtgtggaactctattggaattattcgctgctataatgatgagcaagacaatgccatagatgtggagttccatgatacctccatacaccatgcaacacacttatcaaacactttgaattatacaatagcagatctttcccacgaagctattttgttggcatgtgaaagcactgatgaactagcaagcaagcttcactgcctgcactttagttcttgggattcaagcaaagagtggataatagacttgcctcagaatgaggatattgaagccatatgtctcggtcaaggatgggctgctgccgctactagtgccctgcttcttcgattgtttactattggaggggttcaaaaagaggtattcagccttgctggacctgtggtgtcaatggcaggacatggagaacagcttttcattgtttatcacagaggtacaggatttgatggggatcagtgccttggagttcaactgctagagctggggaaaaagaaaaaacaaattttgcatggtgaccctcttcctcttacaaggaaatcctaccttgcatggattgggttttcagctgaaggtaccccttgttacgtggattcagaaggaattgttcgaatgcttaacagaggacttggtaatacgtggactcctatatgtaatacaagagagcactgcaaaggaaaatctgatcactactgggtggttggtatccatgaaaatccccagcaactaaggtgcattccttgtaaaggttctcggtttcccccaacccttccacgccctgctgttgctatattatcctttaagcttccttactgtcagattgcaacagagaaaggacaaatggaggagcaattttggcgttcagttatatttcacaaccaccttgattatttagctaaaaatggttatgaatatgaagagagcactaaaaatcaagcaacaaaagagcaacaggaacttttaatgaaaatgcttgcgctttcttgtaaactggagcgagaattccgttgtgtggaacttgctgatctaatgactcaaaatgctgtgaatttagccattaaatatgcttctcgctctcggaaattaatactggctcaaaaactaagtgaactggctgtagagaaggcagccgaattgacagcaacccaggtggaagaggaagaagaagaagaagatttcagaaaaaagctgaatgctggttacagcaatactgctacagagtggagccaaccaaggttcagaaatcaagttgaagaagatgctgaggacagtggagaagctgatgatgaagaaaaaccagaaatacataagcctggacagaactcgttttccaaaagtacaaattcctctgatgtttcagctaagtcaggtgcagttacctttagcagccaaggacgagtaaatccctttaaggtatcagccagttccaaagaaccagccatgtcaatgaattcagcacgttcaactaatattttagacaatatgggcaaatcatccaagaaatccactgcacttagtcgaactacaaataatgaaaagtctcccattataaagcctctgattccaaagccgaagcctaagcaggcatctgcagcatcctatttccagaaaagaaattctcaaactaataaaactgaggaagtgaaagaagaaaatcttaaaaatgtattatctgaaaccccagctatatgtcctcctcaaaacactgaaaaccaaaggccaaagaccgggttccagatgtggttagaagaaaatagaagtaatattttgtctgacaatcctgacttttcagatgaagcagacataataaaagaaggaatgattcgatttagagtattgtcaactgaagaaagaaaggtgtgggctaacaaagccaaaggagaaacggcaagtgaaggaactgaagcaaagaagcgaaaacgtgtggttgatgaaagtgatgaaacagaaaaccaggaagaaaaagcaaaagagaacctgaatttgtctaaaaagcagaaacctttagatttttctacaaatcagaaactatcagcttttgcatttaagcaggagtaaaggaagaaagtgaccctagggaagtaatggatttttttttactcatctttgaatatagactcgagtctttgggaaactcattatatatatattttttaaagagtttgaagcaactgtttgtctttataagataatgtagtaattatattggtgtaggtaacaggacatatgtaaaaactatcatctttgcagattactctgcctccaaatgcagggcctttcagagatgcattgtgattgtaattactgagttgaagctccaaccaatttgaatttgtttcttaaccttgaaaaatcattaaagccaaggtattaaaaaaaaaaaaaaaaa

SEQ ID NO: 27932 - DNA, 2371 bp, Homo Sapiens
gggggcgcgtttgccagtcagtctctccggacctgcctcgagcctcaggctgctgaaatcaccgcgcctcactcgcctcgacagtgattctgagtctgcttttagcttccttttgcctgccttggctttttctgttcgtgaacagctgtttggcccatagcttagagaaagcagccttttttctcttcaaagagaacctcctcccagtgctcagagagatggggagcggggagcctaatcctgctggcaagaaaaagaagtatctcaaggccgctctgtacgtgggtgacttggacccagatgtcaccgaggacatgctctataagaagttcaggcctgctggccctctgcgattcacccgaatctgccgtgatccggtgacccgcagccccctgggctatgggtatgttaacttccgctttcccgcggatgcagagtgggccttgaacaccatgaattttgatttgattaatggaaaaccattccgccttatgtggtctcagccagatgaccgcttaagaaagtctggagtgggaaatatattcatcaaaaacctggacaaatccatagacaatagggccctgttttacttattttctgcttttgggaacattctgtcctgcaaagtcgtatgcgatgacaacggctctaagggttatgcctatgttcactttgacagcctggccgctgccaatagagccatctggcacatgaatggagtgcggctcaacaaccgccaggtgtatgttggcagattcaaattcccagaagagcgggcggctgaggtcagaaccagggatagagcaactttcaccaatgttttcgttaaaaacattggagacgacatagatgacgaaaaactgaaggaacttttctgtgaatatgggccaactgagagtgttaaagtaataagagatgccagtgggaaatctaaaggctttggatttgtgagatatgagacacacgaggctgcccaaaaggctgtgctagacttgcatggaaagtccatcgatggaaaagtcctctatgtagggcgagcacagaagaaaattgaacgcctggctgagttgaggcggagatttgaacggctgaggttaaaagaaaaaagtcggcccccaggggtgcctatctatattaagaacttggatgagacaatcaatgatgaaaaactgaaggaggaattttcttcctttgggtcaattagtcgggccaaagtgatgatggaagtggggcaaggcaaaggatttggtgtggtctgcttttcctcttttgaagaggctaccaaagcagtggatgagatgaatggccgcatagtgggctccaagcccctgcatgtcaccctgggccaggccaggcgcaggtgctgagaataagaatgctcagtttgtttcagccttagttggtgcctccttagtttgggctcctttgtgataaggggttattttatgctaattcacaagtttttttttgaagtgaattcttttgaaaaaaaaatgcaaaactagaaaactttattcattttagaatagaacataatttctaactgtaaaattgtcattttgtactttttttgatgtaatatccttagaaatctgtagaataaagtgtattcctccacttttttttcctgaacagtcaaggtgaggcaattgattgagtatatttcccttcttatttcagtaatactctattttttttcatgaaaatgtcaacatggttcttctgaatctatcacagtgaaaagttctaacttgtttttgagaagtcagtacagcaggggaaaacatatgtgatgcaattaacatctgcataatttcacttaaaattattatgcaaaaatgaatgttttttcaaaaaatgtgaaatgtattttattttctttatttgtattcttgtttcattttttaatatgttgtgaacatgctacagatttgatagtacttttgactaaatgttgggagtggtcgtattaacttcttgcccaaagaagtaagcatattggtgttttctcaattagtcactgagaaaattaacactttaggcagtggctatttaaagtaggaattgcatcttaaaaacctttcctaagagatttggtatgtgaggatactttcagtaccactcctaccattcatttttctaaattccttagtacatatacttggatcatgttaaattaacaagaaagatgaataactgcgctgaattgcctttacctataaataatttaatattttaccttcgggttttatcaactgtcaatataaaaggcagtactccacagaatgatgttgaaaaacttcttcgaagaacaccttctattaaacttgttatctcttgtaaaaaaaaaaaaaaaaaaaaaaaaaaaaaa

SEQ ID NO: 27933 - DNA, 2509 bp, Homo Sapiens
gggggagtactaacatggactaatctgtgggagcagtttattccagtatcacccagggtgcagccacaccaggactgtgttgaagggtgtttttttttcttttaaatgtaatacctcctcatcttttcttcttacacagtgtctgagaacatttacattatagataagtagtacatggtggataacttctacttttaggaggactactctcttctgacagtcctagactggtcttctacactaagacaccatgaaggagtatgtgctcctattattcctggctttgtgctctgccaaacccttctttagcccttcacacatcgcactgaagaatatgatgctgaaggatatggaagacacagatgatgatgatgatgatgatgatgatgatgatgatgatgatgatgatgatgaggaggacaactctctttttccaacaagagagccaagaagccatttttttccatttgatctgtttccaatgtgtccatttggatgtcagtgctattcacgagttgtacattgctcagatttaggtttgacctcagtcccaaccaacattccatttgatactcgaatgcttgatcttcaaaacaataaaattaaggaaatcaaagaaaatgattttaaaggactcacttcactttatggtctgatcctgaacaacaacaagctaacgaagattcacccaaaagcctttctaaccacaaagaagttgcgaaggctgtatctgtcccacaatcaactaagtgaaataccacttaatcttcccaaatcattagcagaactcagaattcatgaaaataaagttaagaaaatacaaaaggacacattcaaaggaatgaatgctttacacgttttggaaatgagtgcaaaccctcttgataataatgggatagagccaggggcatttgaaggggtgacggtgttccatatcagaattgcagaagcaaaactgacctcagttcctaaaggcttaccaccaactttattggagcttcacttagattataataaaatttcaacagtggaacttgaggattttaaacgatacaaagaactacaaaggctgggcctaggaaacaacaaaatcacagatatcgaaaatgggagtcttgctaacataccacgtgtgagagaaatacatttggaaaacaataaactaaaaaaaatcccttcaggattaccagagttgaaatacctccagataatcttccttcattctaattcaattgcaagagtgggagtaaatgacttctgtccaacagtgccaaagatgaagaaatctttatacagtgcaataagtttattcaacaacccggtgaaatactgggaaatgcaacctgcaacatttcgttgtgttttgagcagaatgagtgttcagcttgggaactttggaatgtaataattagtaattggtaatgtccatttaatataagattcaaaaatccctacatttggaatacttgaactctattaataatggtagtattatatatacaagcaaatatctattctcaagtggtaagtccactgacttattttatgacaagaaatttcaacggaattttgccaaactattgatacataagggttgagagaaacaagcatctattgcagtttctttttgcgtacaaatgatcttacataaatctcatgcttgaccattcctttcttcataacaaaaaagtaagatattcggtatttaacactttgttatcaagcatattttaaaaagaactgtactgtaaatggaatgcttgacttagcaaaatttgtgctctttcatttgctgttagaaaaacagaattaacaaagacagtaatgtgaagagtgcattacactattcttattctttagtaacttgggtagtactgtaatatttttaatcatcttaaagtatgatttgatataatcttattgaaattaccttatcatgtcttagagcccgtctttatgtttaaaactaatttcttaaaataaagccttcagtaaatgttcattaccaacttgataaatgctactcataagagctggtttggggctatagcatatgcttttttttttttaattattacctgatttaaaaatctctgtaaaaacgtgtagtgtttcataaaatctgtaactcgcattttaatgatcagctattataagcttttaatagcatgaaaattgttaggctatataacattgccacttcaactctaaggaatatttttgagatatccctttggaagaccttgcttggaagagcctggacactaacaattctacaccaaattgtctcttcaaatacgtatggactggataactctgagaaacacatctagtataactgaataagcagagcatcaaattaaacagacagaaaccgaaagctctatataaatgctcagagttctttatgtatttcttattggcattcaacatatgtaaaatcagaaaacagggaaattttcattaaaaatattggttcaaaaaaaaaaaaaaaaaaaaaaaaaaaaaa

SEQ ID NO: 27934 - DNA, 4242 bp, Homo Sapiens
gggggccagaccgcagagacaggttcggatccgcggtcctcttgcctctttccaggcctcgatgagtgttaaatcgccatttaatgtgatgtcaagaaataatttggaagcacctccttgtaagatgacagagccatttaattttgagaaaaatgaaaacaagcttccaccacatgagtctttaagaagtcctggaacacttcctaaccaccctaatttcaggctgaaaagctcagagaatggaaataaaaagaacaattttttgctttgtgagcaaaccaaacaatatttggctagtcaggaagacaattcagtttcttcaaacccgaatggcatcaacggagaagtagttggctccaaaggagacaggaaaaaattgccagcaggaaactcagtgtcaccaccaagtgctgaaagtaattcaccacccaaagaagtgaatattaagcctggaaataatgtacgtcctgcaaaatcaaaaaaactaaacaagttggtcgagaattccttgtccataagtaatccagggctcttcacctccttaggacctcctcttcggtccacaacttgccatcgctgtggcctatttggatcgctgaggtgctctcagtgcaagcagacctactattgctccacagcatgtcaaagaagagactggtctgcacacagcatcgtgtgcaggcctgttcagccaaatttccacaaacttgaaaataaatcatctattgaaacaaaggatgtggaggtaaacaataagagtgactgtccacttggagttactaaggaaatagccatttgggctgagagaataatgttttctgatttgagaagtctacaactcaagaaaaccatggaaataaagggtacggttaccgaattcaaacacccaggggacttctacgtgcagttatattcttcagaagttttagaatacatgaaccaactctctgccagcttaaaagaaacatatgcaaatgtgcatgaaaaagactatattcctgttaagggggaagtttgtattgccaagtacactgttgatcagacctggaacagagcaatcatacaaaacgttgatgtgcagcaaaagaaggcacatgtcttatatattgattatggaaatgaagaaataattccattaaacagaatttaccacctcaacaggaacattgacttgtttcctccttgtgccataaagtgctttgtagccaatgttatcccagcagaagggaattggagcagtgattgtatcaaagctactaaaccactgttaatggagcagtactgctccataaagattgtcgacatcttggaagaggaagtggttacctttgctgtagaagttgagctgccaaattcaggaaaacttttagaccatgtgcttatagaaatgggatatggcttgaaacccagtggacaagattctaagaaggaaaatgcagatcaaagtgatcctgaagatgttggaaaaatgacaactgaaaacaacattgtcgtagacaaaagtgacctaatcccaaaagtgttaactttgaatgtaggtgatgagttttgtggtgtggttgcccacattcaaacaccagaagacttcttttgtcaacaactgcaaagtggccgaaagcttgctgaacttcaggcatcccttagcaagtactgtgatcagttgcctccacgctctgatttttatccagccattggtgatatatgttgtgctcagttctcaggagtaaagccatcattaggaatttggactccagaagctatttgtctcatgaaaaaacttgtacagaacaaaataatcacagtgaaagtggtggacaagttggaaaacagttccctggtggagcttattgataaatccgagacgcctcatgtcagtgttagcaaagttctcctagatgcaggctttgctgtgggagaacagagtatggtgacagataaacccagtgacgtgaaagaaaccagtgttcccttgggtgtggaaggaaaagtaaatccattggagtggacatgggttgaacttggtgttgaccaaacagtagatgttgtggtctgtgtgatatatagtcctggagaattttattgccatgtgcttaaagaggatgctttaaagaaactcaatgatttgaacaagtcattagcagaacactgccagcagaagttacctaatggtttcaaggcagagataggacaaccttgttgtgctttttttgcagatatacagtctagaaacaaacattggtctgaagaagccataacaagattccagatgtgtgttgctgggataaaattgcaagccagagtggttgaagtcactgaaaatgggataggagttgaactcaccgatctctccacttgttatcccagaataattagtgatgttctgattgatgaacatctggttttaaaatctgcttcaccacataaagacttaccaaatgacagacttgttaataaacatgagcttcaagttcatgtacagggacttcaagctacctcttcagctgagcaatggaagacgatagaattgccagtggataaaactatacaagcaaatgtattagaaatcataagcccaaacttgttttatgctctaccaaaagggatgccagaaaatcaggaaaagctgtgcatgttgacagctgaattattagaatactgcaatgctccgaaaagtcgaccaccctatagaccaagaattggagacgcatgctgtgccaaatacacaagtgatgatttttggtatcgtgcagttgttctggggacatcagacactgatgtggaagtgctctatgcagactatggaaacattgaaaccctgcctctttgcagagtgcaaccaatcacctctagccacctggcgcttcctttccaaattattagatgttcacttgaaggattaatggaattgaatggaagctcttctcaattaataataatgctattaaaaaatttcatgttgaatcagaatgtaatgctttctgtgaaaggaattacaaagaatgtccatacagtgtcagttgagaaatgttctgagaatgggactgtcgatgtagctgataagctagtgacatttggtctggcaaaaaacatcacacctcaaaggcagagtgctttaaatacagaaaagatgtataggatgaattgctgctgcacagagttacagaaacaagttgaaaaacatgaacatattcttctcttcctcttaaacaattcaaccaatcaaaataaatttattgaaatgaaaaaactgttaaaaagttaagtaagttaaatcgtatgttttcgcctcttctgtgatcaccaataggacatcttcaggcatattggcaggatagagctaatggagtgaaacctattgtaaggctgtactttcgtgatttaatgacctgaggtttggtcataatgcttctgctgtttttgtaggtttatctgatcgttttcctttgctactgctaatggaactgaacccccaggggtattccagttgtaatagcctttccttactgttgtttggttctgtgaatgcctatgttattgatatgtggagggacttgtaaaacttgttgtgacataaagcttagcctcagattttttgtctagatctgaaattaactcagagctcacttatgcacattgctgtaaatatgtttagcactttttgcgaggggtatctaaagggccaagaacggaaagtggatctaaagggccaagaacggaaagtgggctgcactgagggtatttttcatttaaaaacaaaacatactccctgcttttggctgtggtgattctagtgtctaaagaacatactggtgagttttaaaccagtgttcctccccaccccacccccatattttaaatgtctgggatcctttgttgtaagatggttctcagaaataaatttttgattaagagccaattagaacttctgatcagggctgggggtggtggctcacgcctgtaatcccagcactttgggaggctgaggcgggcagatcacctgagcccaggcgttcgaagtcagcctggccaagatggcgaaacactgcctctacttaaaatacaaaattagctgggcatggtggtgcacacctgttaacccagctacttgggaggctgagacaggagaatcgcttgaatccaggaggcggcggttgcagtgagccaagactgctattatactccagcctgggtgacagagtgagagtttgtcgcaaaaaaaaaaaaaaaaaaaaaaaaaaaaaa

SEQ ID NO: 27935 - DNA, 2986 bp, Homo Sapiens
cggcggaggctgcactgagcgggacctgcgagcagcgcgggcggcagcccgggggaagcgtccgggaccatgtctggagaactaccaccaaacattaacatcaaggaacctcgatgggatcaaagcactttcattggacgagccaatcatttcttcactgtaactgaccccaggaacattctgttaaccaacgaacaactcgagagtgcgagaaaaatagtacatgattacaggcaaggaattgttcctcctggtcttacagaaaatgaattgtggagagcaaagtacatctatgattcagcttttcatcctgacactggtgagaagatgattttgataggaagaatgtcagcccaggttcccatgaacatgaccatcacaggttgtatgatgacgttttacaggactacgccggctgtgctgttctggcagtggattaaccagtccttcaatgccgtcgtcaattacaccaacagaagtggagacgcacccctcactgtcaatgagttgggaacagcttacgtttctgcaacaactggtgccgtagcaacagctctaggactcaatgcattgaccaagcatgtctcaccactgataggacgttttgttccctttgctgccgtagctgctgctaattgcattaatattccattaatgaggcaaagggaactcaaagttggcattcccgtcacggatgagaatgggaaccgcttgggggagtcggcgaacgctgcgaaacaagccatcacgcaagttgtcgtgtccaggattctcatggcagcccctggcatggccatccctccattcattatgaacactttggaaaagaaagcctttttgaagaggttcccatggatgagtgcacccattcaagttgggttagttggcttctgtttggtgtttgctacacccctgtgttgtgccctgtttcctcagaaaagttccatgtctgtgacaagcttggaggccgagttgcaagctaagatccaagagagccatcctgaattgcgacgcgtgtacttcaataagggattgtaaagcagggaggaaacctctgcagctcattctgccactgcaaagctggtgtagccatgctggtgagaaaaatcctgttcaacctgggttctcccagttacggaaaccttttaaagatccacattagccttttagaataaagctgctactttaacagagcacctggcgtgggccaagtgcctgatactcccttacactgaatcatgttatgatttatagaaatacctttcctgtagcttttatagtcattgtttttcaaagacgatataccagccctcacccaggttttaaaaaagcactggtaggcatagaataggtgctcagtatatggtcagtaaatgttctattgattatcaatcagtgaaaaaagaaatctgtttaaaatactgaattttcatctcactcccattgcaaatcaaggagatctcagcagtgaactgggaaaatacaaaagctctgggctaatctataaaaacttaccctgaaatattaagggcagtttgcttctagtttggggattgcgctagcccaatgaaggtgatgaagcttttggatttggagggtaaaagctccttcacaccccttccaaaagtcagtcacagaccactgcaacatgccttccctgctggatcattatatacattcagattgtgagtggattgccttggttgacttttaatttattgttttttgttcttataaagatgataatcttaccttgcagttattgactttatattcaattatttacatcaaataatgaaataactgaaatgtacaaatgtcaaattttggaagtatattcaataccaatgctgtatgagtgggctgaatccagttcattgttttttttttggtaagaagtgagactacagttccagctacctacatgtcttttcttgtcatccttatagatctctttggctttcagaaagatacagtgataatgtgtgtatgaatcagtcacaatgaattttacttgaatattgtatgttgcattccacttcatttgaaaataatgaaaccatgtaccactgtttacatcatctgtagtgatttcatagataatatatttaatatgacagattatgtttcaactctgtagatgtttaacgtcatagacagttggccctctgtatccgtgagctctatatctgtgaattcaaccaagtttggatggaaaatttttttttttttttttttttttttgagacggagtctcgctctgtcacccaggctggagtgcagtggcgtagtctcggctcactgcaagctccgcctcctgggttcacgccgttctcctgcctcagcctctctgagaagctgggactacaggcgcccgccaccacgcccggctaatttttttgtatttttagtagagacggggtttcactgtggtctcgatctcctgacctcgtgatccgcccgccttggcctcccaaggtgctgggattacaagcgtgagccaccgcacccggcctgaaaatattttctaaaaagataaaaaatatacataacgatgaaaaataatacaaatttaaaaaccaatacagtataacaactatttacatagtgcttacattgtattaggtgttataagcaatctagagatgatttagcaagtatacaggaggatgtgcctaggttatatgcaaatactgtgccattttatatcaggaacttgagcatctgcagatattggtatcggagggcggtcctggaaccaagcatccacggatactgaggggtgacatttcatgaagtgtagatcattgtattcagagattgtaaatgaaaaaaatatagaaactatttagttttggtagattttttttctgacaatgtgaccagactgaatttcctcataaagaaaaaatggcgaaaaaaaaaaaaaaaaaaaaaaaaaaaaaaaaaaaaaaaaaaaaaaaaaaaaaaaaaaaaaaaaaaaaaa

SEQ ID NO: 27936 - DNA, 2782 bp, Homo Sapiens
gattagtggttggacccaaaggagcaactattaaaagaattcagcagcagacccacacctacatagtaactccgagcagagataaggaacctgtctttgaagtgacagggatgcctgaaaatgttgaccgagcacgggaagaaatagaaatgcatattgccatgcgtacaggaaactatatagagctcaatgaagagaatgatttccattacaatggtaccgatgtaagctttgaaggtggcactcttggctctgcgtggctctcctccaatcctgttcctcctagccgcgcaagaatgatatccaattatcgaaatgatagttccagttctctaggaagtggctctacagattcctactttggaagcaataggctggctgactttagtccaacaagcccatttagcacaggaaacttctggtttggagatacactaccatctgtaggctcagaagacctagcagttgactctcctgcctttgactctttaccaacatctgctcaaactatctggactccatttgaaccagttaacccactctctggctttgggagtgatccttctggtaacatgaagactcagcgcagaggaagtcagccatctactcctcgtctgtctcctacatttcctgagagcatagaacatccacttgctcggagggttaggagcgacccacctagtacaggcaaccatgttggccttccaatatatatccctgctttttctaatggtaccaatagttactcctcttccaatggtggttccacctctagctcacctccagaatcaagacgaaagcacgactgtgtgatttgctttgagaatgaggttattgctgccctagttccatgtggccacaacctcttctgcatggaatgtgccaacaagatctgtgaaaagagaacgccatcatgtccagtttgccagacagctgttactcaggcaatccaaattcactcttaactatatatatatacataaatactatatctctatatggactcgtaaaggcatgggtataatggtaccccccagtaaacttcctaatgatttcttatgactgttatcaggctttattgggattaggctaaagttgttagtaaacttataaaaggctgctatggtaacactaaacctaagtggtctcttgtctattagtttggtttgaattattagtactatcctgtagacccagagacatagtttatataagaattgctaaagctgaagttcaacttggctgagtgaagataatcataggttgtgtgagcctatgaaaaagtgtatacgtctaagatttcaaaacaatgggtcccaaagcctaaccactttaagagtttatggagggtacttggcattacagacgattcatacacttccagtgctgccttctttacactgccagttttgacaaaacaggtttgttttttattttacaacaacatatgcctaattctgcaggattgcaagtaactttttaatgcattgtgattacttattggtaatgatagggctgatggcagtttactagatcactggttataatttgggacaaaaactgctacatcaactttcatctcgcccagagtgctcaaggctggtatgatcagtggatcaggaatgcaattgtgaattcctgcccattgcctctcttggtgaatgtggaaatggccacctgggttttcccatatcaggaagggctttgggatggcacctatattggctgataattgaggatgcaaacattccattcattagtgtgatcgagctgttaatttttagactatagatcaaaatgtgaaacattttatgttcaatccatatttgtcttgcacattataaatatatttttattttttagtaatttaggggagggaggagggagaaagggataatgatgcccttggcataattcacaaaagcagctgtgacaacctccaatcagtttacttcatttcaaaactatttccaatcacaaggaaagatttatttaaaatatactcgtacatttcacctgtggatgtctataacttcatcctcagtatgttcccaaatctgtgctggcattgaaaggacaaaacattatactagtgggtttttctactaattattttttgaagcattattttcccaacacaaaagagcttttttctcggtataatgaaaattgaaatcctatgtgtattcaatagtaaatagacaaattttattttttatttccacttgaagagttacatttcgtataaaagtttacaaataacggtttttattttgattttttcagtataaaaaaagttgccttgatggcatattatgatgtaatgctaattgcttgtaggatagtaaatggtcagtattgaaacctaatctctagctgccgtcttgtagatatgaacgaatgttcaccaagcatgtattttgtattttgttgcattgtacactgcaactaataagccaaggaatcgacatatattaggtgcgtgtactgtttctaaaaaccacaaactaagaatgataaattatcaatatagtttagtatttgctaattttactacactcttttgttatgtatatgtagggaagtcatagggattataaattcaatttgagtaaaatttaaaaccatatattttatgataaagggcctttaacttaagatggccaaagcactgatattatatatttgctgtaaagagaattataagagttttatttttctgatattaaaagttacttaataaagacttgtttccattaacttgaaaaaaaaaaaaaaaaaa

SEQ ID NO: 27937 - DNA, 2782 bp, Homo Sapiens; identical to SEQ ID NO: 27936

SEQ ID NO: 27938 - DNA, 5711 bp, Homo Sapiens
gagtgtcaaacttgacatcagcctgcgagcggagcatggtaacttctccagcaatcagagcgctccccctcacatcagtggcatgcttcatggagatatgctcctctcactgccctctgcaccagcaacatggattgtcagctctccatcctcctccttctcagctgctctgttctcgacagcttcggggaactgattccgcagccttccaatgaagtcaatctactggattcaaaaacaattcaaggggagctgggctggatctcttatccatcacatgggtgggaagagatcagtggtgtggatgaacattacacacccatcaggacttaccaggtgtgcaatgtcatggaccacagtcaaaacaattggctgagaacaaactgggtccccaggaactcagctcagaagatttatgtggagctcaagttcactctacgagactgcaatagcattccattggttttaggaacttgcaaggagacattcaacctgtactacatggagtctgatgatgatcatggggtgaaatttcgagagcatcagtttacaaagattgacaccattgcagctgatgaaagtttcactcaaatggatcttggggaccgtattctgaagctcaacactgagattagagaagtaggtcctgtcaacaagaagggattttatttggcatttcaagatgttggtgcttgtgttgccttggtgtctgtgagagtatacttcaaaaagtgcccatttacagtgaagaatctggctatgtttccagacacggtacccatggactcccagtccctggtggaggttagagggtcttgtgtcaacaattctaaggaggaagatcctccaaggatgtactgcagtacagaaggcgaatggcttgtacccattggcaagtgttcctgcaatgctggctatgaagaaagaggttttatgtgccaagcttgtcgaccaggtttctacaaggcattggatggtaatatgaagtgtgctaagtgcccgcctcacagttctactcaggaagatggttcaatgaactgcaggtgtgagaataattacttccgggcagacaaagaccctccatccatggcttgtacccgacctccatcttcaccaagaaatgttatctctaatataaacgagacctcagttatcctggactggagttggcccctggacacaggaggccggaaagatgttaccttcaacatcatatgtaaaaaatgtgggtggaatataaaacagtgtgagccatgcagcccaaatgtccgcttcctccctcgacagtttggactcaccaacaccacggtgacagtgacagaccttctggcacatactaactacacctttgagattgatgccgttaatggggtgtcagagctgagctccccaccaagacagtttgctgcggtcagcatcacaactaatcaggctgctccatcacctgtcctgacgattaagaaagatcggacctccagaaatagcatctctttgtcctggcaagaacctgaacatcctaatgggatcatattggactacgaggtcaaatactatgaaaagcaggaacaagaaacaagttataccattctgagggcaagaggcacaaatgttaccatcagtagcctcaagcctgacactatatacgtattccaaatccgagcccgaacagccgctggatatgggacgaacagccgcaagtttgagtttgaaactagtccagactctttctccatctctggtgaaagtagccaagtggtcatgatcgccatttcagcggcagtagcaattattctcctcactgttgtcatctatgttttgattgggaggttctgtggctataagtcaaaacatggggcagatgaaaaaagacttcattttggcaatgggcatttaaaacttccaggtctcaggacttatgttgacccacatacatatgaagaccctacccaaactgttcatgagtttgccaaggaattggatgccaccaacatatccattgataaagttgttggagcaggtgaatttggagaggtgtgcagtggtcgcttaaaacttccttcaaaaaaagagatttcagtggccattaagaccctgaaagttggctacacagaaaagcagaggagagacttcctgggagaagcaagcattatgggacagtttgaccaccccaatatcattcgactggaaggagttgttaccaaaagtaagccagttatgattgtcacagaatacatggagaatggttccttggatagtttcctacgtaaacacgatgcccagtttactgtcattcagctagtggggatgcttcgagggatagcatctggcatgaagtacctgtcagacatgggctatgttcaccgagacctcgctgctcggaacatcttgatcaacagtaacttggtgtgtaaggtttctgatttcggactttcgcgtgtcctggaggatgacccagaagctgcttatacaacaagaggagggaagatcccaatcaggtggacatcaccagaagctatagcctaccgcaagttcacgtcagccagcgatgtatggagttatgggattgttctctgggaggtgatgtcttatggagagagaccatactgggagatgtccaatcaggatgtaattaaagctgtagatgagggctatcgactgccaccccccatggactgcccagctgccttgtatcagctgatgctggactgctggcagaaagacaggaacaacagacccaagtttgagcagattgttagtattctggacaagcttatccggaatcccggcagcctgaagatcatcaccagtgcagccgcaaggccatcaaaccttcttctggaccaaagcaatgtggatatcactaccttccgcacaacaggtgactggcttaatggtgtctggacagcacactgcaaggaaatcttcacgggtgtggagtacagttcttgtgacacaatagccaagatttccacagatgacatgaaaaaggttggtgtcaccgtggttgggccacagaagaagatcatcagtagcattaaagctctagaaacgcaatcaaagaatggcccagttcccgtgtaaagcacgggacggaagtgcttctggacggaagtggtggctgtggaaggcgtagcatcatcctgcagacagacaataattctggagatactggtggaagttccaagtccaataagacactcaaatatgagtacaaatgccttaaaatggaattgaaaaactctttattttcccctatcatttattggatgggtgggtggggtatttttttgtaattgcttttttaaatattagttaatggattaaatttaattcttcagcgtaaaatggtgaagaactagcatatagccattgatcataaactgactatcataaaatcaaaacaagtgaaataacaaaatggacatggtggctttgtttaggtagagccacaaaagaaaagacttgtaatatttttatatacagaggaaatctgtaacaggtattttgtttcttttaaagcaagcaacacagaggaatttatacctcaaactatctggccatatttactaccttatcactgcattattctcttttatctgtttaaagcatatagagatgaagtttgtagttgttttaagtactacacatttttaaattgttagcttccttaagtatatcatgtaaagaaatgtcttaatttttgaaaaaagtacatatttattttcttttgaattgtttttattgttttctatttatgccttgatgatttaatatggatttgttacagccaagtgccaaatgctctctcaaattgtcagcaatttaactagacacagataataatgggtttctttcagattttttgaaccatccacttacatatatttttaaaaaatgaaatccttttcctgttcatacactaaccaaatctctcaaatctgttatcccaatcattgttgcctctccgtttattataaactgtatgctcacaacttagtgtaatataccagcttgtatgcaatggattttcaaccagataacatacctttcctgctctggtgcttagagactatcaactccctcctttagtgaaggagccgtgttagagcttccgagaatagctccactggagagaagtggaatcctatatagaatgctgcactaattgacaacacagcctataggccaatgcatgagtaaaaaaaaaaacaattactggctcactggctttgaaaagtcacttactattgttgctgaaacttgctgagctgtttatagagaatgatgataacagaacttttcctctgtatcactggtgtttaggtgaattaattaaacattgtgatcattagtaccaggtattattatctttaagagtcttccacttcaatgcacatggtgcagttttggtgtgtaacttagaaggattgaacttctttgaatttactggacataacattttcagaatagttggtcatctagcaaccgcctcaaaatgtgtaagcaggagagaaatttctcatcacagggatttagacttactattacataaaggctaactatgagcttgctcattaattttgaaaagatgtacctggtggatatctagctagtaatatattctgaagcaacattttagctctattgatactctttctaatgctgatatgatcttgagtataagaaatgcatatgtcactagaatggataaaataatgctgcaaacttaatgttcttatgcaaaatggaacgctaatgaaacacagcttacaatcgcaaatcaaaactcacaagtgctcatctgttgtagatttagtgtaataagacttagattgtgctccttcggatatgattgtttctcaaatcttggcaatattccttagtcaaatcaggctactagaattctgtattggatatataagagcatgaaatttttaaaaatacacttgtgattataaaattaatcacaaatttcacttatacctgctatcagcagctagaaaacattttttttttaaatcaagtattttgtgtttggaatgttagaatgagatctgaatgtggtttcaatctaattttttcccagactactattttcttttttaggtactattctgagcatactcaacaaaacccatgcatttcataaactaatagaagttgaggattgttgaatctatttcacttattttggctgtggtttccatctgaaagtagaggttgtatacaccatatactgttcttcattttattaatatttttctccttgacctctcataaatttactttacacaattcttaccctgtacatatgtaaacataagtgtacgattcttaaccatggagtagaggtactagaatgcttacggccatctctttgtacaggaactgcattgactttcagtaaacataaagccacaactcctacatgatgttatgtaccatatgatctgttttgtatcttaaatttgatttacatatattatttatttctggtaactcactcagtttatgctgtgctaaatatcaatcaagccatgtataaatgtgatatgattggcaatatgtgtttactttaaacttgtcttttcaaaatattactcagtttatgttgtacaatgtagatggcctcttactaatgtaaaatgatttgtagtggaaacatttatatttttataataaacataatgaaaataaaaaaaaaaaaaaaa

SEQ ID NO: 27939 - DNA, 3883 bp, Homo Sapiens
gaggccgccgagtcggccgcggccgaggaggggcaggcggaggtcgggggcgccgcggccgcggggtcaggttccccggcgggaggcgcaggtggcggcctggggagctggcggccgctcctcgcctggctgcagcggcggcagccccagtgctgcccctgtgcggcgcccctttcccgctccgccgcgcactgttgtcatggaggaaccagatggcggctctggcctacaacctgggcaagcgggagatcaaccactacttcagcgtgaggagcgccaaggtgctggcgctggtggccgtgctgctgctcgcagcgtgccacctcgcctcccgccgctaccgaggcaatgattcgtgtgaataccttctctcaagtggcagatttcttggagagaaagtttggcaacctcacagttgtatgatgcataaatacaaaatcagtgaagcaaagaactgccttgtagataaacatattgcatttattggagattccagaattcgtcaattgttttattcttttgtaaaaataattaatccccaattcaaagaagaaggaaataagcatgaaaacattccttttgaagacaagactgcatcagttaaagtggattttctgtggcatcctgaagttaatggttctatgaaacagtgtatcaaagtgtggactgaggattccattgcaaagccacatgtgattgtagcaggagctgccacatggtccatcaagattcacaatggtagcagtgaagcgctttctcaatataaaatgaacatcacctccatagcaccacttttagaaaaattggcaaagactagtgatgtttattgggtcttacaagatcctgtttatgaagatctattaagtgaaaataggaagatgatcactaatgagaagatagatgcttacaatgaagctgcagtcagtattttgaatagtagcaccagaaattctaaatcaaatgttaagatgttcagtgtttccaaattaattgctcaagaaaccatcatggaatctttggatggcttacatcttcctgaatcgagcagagaaactactgcaatgattcttatgaatgtgtattgcaataagattttgaagcctgtagatgggtcctgttgtcaacctcggcctcctgttactctcatacagaagctagctgcttgttttttcactttatctattatcggatatttaattttttacataattcatcgtaatgctcatcggaagaataagccgtgtactgatttggaaagtggagaggaaaagaaaaatattatcaatacccctgtgtcttcattagaaatacttttacaatctttctgcaaacttggcctgattatggcatatttctatatgtgtgacagtgcaaatctgttcatgaaggaaaacaaattttatacacattcatctttctttattccaattatctacattttggttttgggagtattttataatgaaaatactaaagagactaaagtattaaatagagaacaaacagacgaatggaaaggctggatgcaacttgtgattttgatttatcacatttctggagcaagtacatttttgcctgtatacatgcacattcgagttctggttgctgcatatttatttcagacagggtatgggcatttctcatacttttggataaaaggagattttggaatctacagagtatgtcaggttttatttcgtctcaatttcctggtagtggtgttatgtatagtaatggatcgaccttatcaattctattactttgtccccttggtcactgtatggttcatggtcatatatgttactttagcactatggccacaaataatccaaaaaaaagcaaacggaaattgtttctggcattttggcttactgttgaaactaggctttttgctgttattcatatgttttttggcatattctcagggtgcatttgagaagatcttttctctttggccattgtccaagtgttttgaactgaaagggaatgtatatgaatggtggttcagatggaggttagaccgttatgtagttttccacggaatgctgtttgcttttatttatctggccttgcagaagcgtcaaatactttctgaaggaaagggtgaacctcttttttcaaacaaaatttcaaattttctgttgtttatttcagtagtttctttcttgacctattccatctgggctagcagttgtaaaaacaaagcagagtgcaatgaactccatccgtctgtttctgtggtacagattttagccttcatcctaataagaaacatccctggatatgcccgttcagtttacagttcattttttgcttggtttggaaaaatttcattagagctatttatttgccagtatcacatatggctggcagcggacacaaggggtatcttggtactgatacctggaaaccctatgctcaacatcattgtcagcactttcatatttgtttgtgtggcacatgaaatttctcagatcactaatgatcttgcacagattattattcctaaagataactcatctctcttgaaaaggttggcatgtatagctgcatttttttgtggactcctcatcttatcatccattcaagataaatcaaaacattaggttccaaaaattctaaaaaacctaaactcttcaggctacctttgtgtgtctctagaagagaaaagcatctatctggagatataaatgtgtatgtaaatataaacgtttgtggcaagaggacagttctgtgacatctgttgaacatatgtggttgtatatattggaaatgtacatatccaatatgaaatactaaaacaaacaaacaaacaaaaaaccagaatgcattgtataggattgcatgtgaagtcttttctactgaatctatatttccatttgtaagtgattttaagttaacatatgaaggcagggaaatgattacctttccagtaaaaagtatagataatttaattaacttagtgacaccaccaagtgttttgatataactaaatttgtggtaataagactgtctgcacctgtattcattgtggaacttcctctttcattggaaactttcttactcaagaatgacggcagtattgttttcttatatgtgcaatgaagtggaatgataaacagtatgcctttaatttatatgtgttcttgttctgatgttgtttcctgaaatgatttttcttcctaactgtggttttcgggtatgcaagcctaaatctttgtacactttgtctcacagaatagttctgaggctccatgacagggttttgtcattgttgatgttattgttgcttcgttttataaaaaagccaaaatttttttttccaatccaaacgttcacctgtttcctttcctcaagctataccagtgtaataccagttaccctgtggatccatttaatatgttatccccactaattaattttcgtatattatttccaatatttggaaagctctttatagccatttggtatttcctattacccacctcctattttaaatatttatcagtctaaacttgtgcagtgtagtaaacatgcaagttgttatgattgagctgtattaccataagtagaattttaagtaaactggtgaatttgggccatagatgtttttgctttttgtttgatttttttttacaagctaactgttagaggtatacatttatttatctgttgtacagatttgattatgattttaatgtttgaaagattgcacttgtttgcttttactatatgtggggtaaaatatattttctgttcacagtatatgaaaatatggagtaatttaaacagtaaataaacattctgtggatgcttaaaaaaaaaaaaaaaaaaaaaaaaaaaaaaaaaaaaaaaaaaaaaaaaagaaaaaaaaaaaaaaaaa

SEQ ID NO: 27940 - DNA, 5212 bp, Homo Sapiens
gcgagttttgaagccgcggggccgggcggctgcaatatggcggaggcggaaggggaaagcctggagtcctggctcaataaagccaccaatccttccaaccgccaggaggactgggaatacataattggcttctgtgatcagatcaacaaggagctggaagggccacagatcgccgtccgactgctggcccacaagatccagtccccacaggaatgggaggcgctccaggccctgacggtgctggaggcatgcatgaagaactgtgggaggagatttcataacgaagtggggaagttccgctttttgaatgagttaatcaaagtcgtctctccaaagtacctgggggacagggtgtctgagaaagtgaagaccaaggttattgagctgctgtacagctggaccatggccctgccagaagaagcaaagatcaaagacgcctaccacatgctgaagagacagggcatagtgcagtctgacccaccaattcctgtggataggacgctgatcccctctccaccacctcgtcccaaaaaccctgtttttgatgatgaggagaagtccaagcttttagccaagctgctgaaaagcaaaaacccagatgacctgcaggaggccaacaagctcatcaagtccatggtgaaggaagacgaggcacggatccagaaggtgaccaagcgtctgcacacgttagaggaagttaacaacaacgtgagactgctcagtgagatgctgcttcattacagccaggaggactcttcggacggggacagagagctgatgaaggtgggaccgccgacggcaaaggctgcctcccggggctgcgctgcccttcaggagctcagccagcttttgctgagcacgtgccttgtcagagacacgggctgtgcacttggcagtgtattcatgaccttactcatctgcacagcagccacgtcagtagagggtggcgtccccatttgcctcctgggatcagctgacttgtccagggtgtgagggccagatggaaacctgagtctgactccagagaccacactctcggtgctcacccctgctctctccctttccttactaccttggggacatcaagacagagaggcttccttgtaaccctgatgcccatgtggtgcaggccatggttgggtggatattttgagttctgaggaacatgccagcctggaaggcaggaggggactgacttcccctgacccatcctggtgactgctacctagacaaacatcctgggtgatgtggtgtggtggtggtggctggtggcaagaagacgtgcgctgtgatcccagctttgctggtaattgaccgtggcaattggcatatcccggtcattttctgggcatgaaccctgaatgaatcagatgatctctaagggcctttgtggtttgatttttatgtccgagtctctttcaggagctgtttgatcagtgtgagaacaagaggcggactttatttaaactcgccagtgagactgaggacaatgataacagtttgggggacatcctgcaagccagtgacaacctctcccgggtcatcaactcttacaaaacaattattgaagggcaggtcatcaatggcgaggtggctaccttaaccctgcctgactcggaaggaaacagtcagtgcagtaaccaaggcacgctcatcgaccttgcggagctggacacgaccaacagtttgtcctccgtgttggccccagcacctactccaccctcctcaggcatcccaatcctccctccaccaccccaggcctcaggacctccacggagccgctcctctagccaggccgaggccaccctggggcccagcagcacaagcaacgccctctcctggctggacgaggagctactctgcttgggtgcggcccacagggggcgtcaggggcatcccctgacagggctctgggaggaagggtgtgtggaattaggagccctgagcggggccccagtgtgactgttggggtgggcaaagaaccctgagttggaggtactcagtgaagttcagcgaccctgagggccccagggccatcctcccggtggactctgcctcctgccctgcaccccgccccacaggccccccgcttctgcatcatggactggagcgctccattcccctctggaggctgcctgcagaacagcttctccctgcgccttcacccattgatgtcacttgtcacctgacccctcctcaggcaaggcggggctagggctgcctagctcagagcctcttctcatcctgttttcttctctattgtcaggcctcgccgacccagcccctaatgttcctcccaaagagtcagctgggaacagccagtggcacctgctccaggtaggggcacaggatcggtgacagcactactgtgccaaggacctccactttccagcgtcatgtctcctgggctgcagttagctgtccttccctccagagcgtgccagctgcagcggggaacaatgagtgcctccggggctgtcttccgtgcagtccttggagggctgcgccccgttccagcggcaggccctccccacccgccctcggctcaccaccctttctgttgttcatagagggaacagtccgacctggacttcttcagccccaggccggggaccgctgcctgtggcgcctccgatgctcctctgctccagccctcagccccctcctcaagcagctcccaagctccactgccgcctcccttcccagctcctgtggtcccagccagtgttcctgcccccagtgcgggctcctccttgttttctactggagtggccccagccttggccccaaaagttgagcccgcagtccctgggcaccatggcttggcgttgggcaacagcgcgctgcaccacctggatgccctcgatcagcttctagaagaggccaaagtgacctcgggcttggtgaaacccactacctcccctctcatccccaccaccaccccagccaggcccctcctgcccttctccacggggcccggcagcccgctcttccagccactgagtttccagtcccagggcagccccccgaaggggcctgagctctccctggccagcatccacgtgcccctggaatcgatcaagcctagcagtgcccttcctgtgacagcctacgataaaaacggcttccgcatcctcttccactttgccaaggagtgtcccccaggacgacctgacgtgctggtggtggtggtgtccatgctgaacacggctcccttacctgtcaagagcatcgtgctgcaggctgcagtgcccaagtcaatgaaagtgaagttgcagccaccttctgggacagaactctctccatttagccccatccagccacctgcagccatcacccaggtcatgttgctggccaatccactgaaggagaaggtgcggcttcggtataagctgaccttcgccctgggggagcagctgagcacagaggtgggcgaggtggaccagttccctcctgtggaacagtgggggaacctatgaccccagaggacgctgtgatctccaccttgaagccaggcaggctgccctgagacgaggagggctctggtcccgtcactctccatgccctgacaacagtgcttgtagctttgatgtggaacaggggccctgggcatttctgctgagaaccaaactgctgctgtgataacctctcctttggcccctaaaaggacctgtttttatctacctgtgtgacttgaagtggccatatgctgtcaggggtgcggagtggcccctgacttcactgctgtcccgggaacatggacccccaggcttggcgtaggtgtttgcttccttctactggcattcactgaagccactggggtggggggtggggggtgggagtctctaaagagagactgtcatgggtcattccccacaagagccacatcctcacacctgacagatgcacggcccaaggggctgcagccctgttgcaattccatgcttcccccgccaaccagctcctgctgccatccccagggaggtggcccaggaaggtgcctggcccagaataaggaactggcatactgcaaagtccccagccctgcctctggtggacagcatcgtcctggaatggccacggagtgatgagttgtgtgcttgtccctggcagtggcaggctgtgtcctatggacatcttggcaggacatggaatttggcctcatgacaggcccaactagggataggaaggaaaatgaagagagccagtatttccccttctccagaagcaggtactcagctttctgggaaaagcgtgcctccagccgtggggacaggccatcctactgactacctcttgcttggcatgaaataaactgctatcctccccttggaatctaccgccactctacatcctactgctttggcctccctctcctctcaccagatggcatgtggtgtggcacctgtggctggacacaggaggcctcaggatcacaaatgttacactagacatatgtcctaatgtgctgcccagaaacctcaactgttccccagctactgaggggcactgtcagcgagatgttgggtctggaggtgatgagatcgggccacacttgagctgagtcaccagaccctattgcttcaacagtgcttggcccccgccagcttgtcccagccactctagctgctggatgtgatcctgggacatgtactccaagcctccgtcacaaaaaaaaaatcaccagctgccatagacacgggggaagcttgcggagcccaggtgaacaagctcagcaatcggacatctctggggaaaggaaggtggcacagaccatgttccctggttcctccctgccccttgccaggcttccttattccttactatgggaagaggtcatatcccttccctgcccctcgctgtctttagcaagcaggtttcactgcttcattagaagaggacaagtcaaaagtgaatcatttttcactacttaaggaataaatccaggagctttccagagactggctgctgcagccctgggaatgtctgtggaattactatgtggaaatggaactttgtgttatgctctagacattacagttatttgagtgttactcgttactgttgaggtcagtgcttcgtggcaaatggctgtactggatatcccagctctgctgcccttgttttgctgcatgttaaataaaaccattttcactgtaaaaaaaaaaaaaaaaaaaaaaaaaaaaaaaaaaaaagaaaaaaaaaaaaaaaa

SEQ ID NO: 27941 - DNA, 4980 bp, Homo Sapiens
gcgagcgagcttccgcgccgcccgcacgcgcgacctacctgggcgctccgcgcccccggatgctgcaggttattcagcgatagttatgacctcccggttacgtgcgttgggtggaagaattaataatatacgcacctcggagttacccaaagagaaaactcgatcagaagtcatttgcagcatccactttttagatggcgtggtacagacctttaaagttactaaacaagacactggccaggttcttctggatatggtgcacaaccacctgggtgtgactgaaaaggaatattttggtttacagcatgatgacgactccgtggactctcctagatggctggaagcaagcaaacccatcaggaagcagttaaaaggttggtgtgatcttttcatttcagtcgaacattaggtgttagtgtatcacagcctgtttctcccctccaatcgtcagtgcctgtgacatctggtacctgtagttccgggtgtccaggagtcatgagtgagccgacttctccctgtctgacttctgagtcagcagagatgcttccagatcagccctctaggatccgccccagctgtgggaaagaaggggaagggtgagagtaggcagctcagagcgagggaacccacatttctgtatacaaggaaggaaaaggaaggaggatggccttacttagcccgatgtgagagccagggtggacaagagagacagggagatagacaaacacaaacacctcatactttccaacagcatagtcgcgttcacggaaaaccaaagcataagtaggtaatgtcaccaatataaaagattaagtcttccaaactaccgcttatctctcaggagtgaatcccagtgctgcagctaactcccagttcggtggccagtcaggccacaccatagtccaccctctgccctgatctgctctcggcctgatgttccaacattgccagcattgttcccctttatgccactcatgccccagacaaacctggctgatctgcagggcctcccagtgcctcccctcagtctgttccatctgctgggaatgcttttccctcccacttccctctgtcgaaatcctgccttttttcaaggctgctcagatctcatttcctctcctagaaactgtgggtggctccctcgacattctcttagatttaccatcacccgtgttggggttctgaatgctcttgtcctcatctgtgttagttgcctttagttccctctcagaactgcaagttccttgaggttaggacccttgttatatttctctctgcatccccaaggtgcccaacacacacaaaaagtggccagtgcatggcggagtggagaagggcaagtggatttgcgcacgcaggtgcgcatacacaggatgccccccaacacacacacgcacacctgcctcagcacccaggcaggaaggagtagacacagtggccttcgctcccgtctcactgctgcccccacagggagcccgattctcaaagttcttccctcccatgagctgcatcctctgcgttcagaagtacctgtgggagcctcagggccacttgcagacaaatacctgcctcatccaagtccccaggaatgagtccacacaaggcatgaataggtgttgtcattcattctctcattaactcctgctttcggtgaacgtatcctgagctcagactgtggcaaggtgctgggctaagccctgggaatccagtccagatcaaatttggactctcccctcaaggagcccacagccaagtgtgcagacagcccagagggttcgacattctatgatagtagtaagcacacgataggggacagccagaaagaaaaagaggctatgcctgcagcgcagagatgaaaagttttagaagagggggaggggaggtgaacaagcatcccaaggcagcaggaggacattgttctcccctgatgtgcagattgtcatagcgccatccgctggtacctagacatgtggacaggtgtactcaggggcacacccccgttagggattctttgaacacacgctgcagatgaagaaagaaagcactaaagagcagggagggtagagctcaggatgacctcaggtagaggaggagatctagcaggctagtgagaaggacttgagttgcagagagcaagaaagtgctcagtgcctagatagggctggcgaatatttactgagggatgatggtgaaattgacatgaagatcttgggatcttagcagcacaatctgatcttctcctgttgccgtctctgtgagaagaaatggactaattttatccacacaagcaaattgactctagatgttgatgcataaagccgtatttgaatatgttcattgtgtgatttactagtatactaacttaatatactttacattaaaagcatgagatattttctagtttaaaaatgattttgaaatgtggtatagcagaatcaaagatctcattactctaattctggttttgtcaccagctgtgtgacctaaggcaagtcacctctaattggcttatctgtaaaagggggctaccagtagcagcgtagcccactcatagtcatggtggtgttgaaatgcaggaatgtacatgaaaatgcttgaaacttataaatggctacacaaacgcaggctattatttctttgtatattttgcataataatgccgatttaaggattttttaaattcctaatacagatgacggagtgcaatgtttaaacacagccctaagataaacgtgtgctaggaagtagatgataactcagtctgtgctgatgttgcataaatgttttactttttgaagacttggagatttctgaaacaactaacttatgtactccatgtttgaaattagcccttttataatggaaaaagctatggttgagtgaaaaaatgcatcacttatggaagagaagcaacttacatacattgactttgtcaaagggaaaatttaatttgtttttgaaaaatgttgtaggaggtttcccctgtaccctgcattttcgagtaagattttttatacctgatcccaacacactgcagcaagaacaaaccaggtaacaacatttttttaaagttttctgtttagtgtataaaaatgagtaaccactaaaaatgtactcttcattttattactatggccaaataacttcatttgggtgtaactacaccaacaatgatgatccaagtaaaaatctggggtgcacatactgacattttaatcagctaatgagttttcagtcttgggcctgcttctcttatctcctgatttgctgccattcccagcatactcccatctgccacctcctacctctcccacctccttccacctccctggcctctcctgcctgctgaacacactgtgctcaaaggacaaaaagtcattttctaccaatgtagcaggatgtagaagacaaatttgtaaaatagtcatccacaggtcaaatagcatgatgtctctgaagagctaaaatcaaggctcttgaagataacaagacatctcttgttataagaattttctttctttttttttgttttgagacggagtctctctcttcaccctggctggagcgcagaggtgcgagcttggctcactgcaacctccgcctcccaggttcaagcgatcctcccacctcagcctcccgagtagctaggattacaggcaggtaccaccatgcctggctaattttttttttttttttttttttaacggagatggggttgccatgtcgtccaggctggtctcaaactcctgacctcaagtgatctgcctgcctcggcctcccaaggtgctgggattataggcatgagtcaccaggccagctttgttataagaattttctatcagatccccagtttgcaagagttagaaaggagagcaggctggattcagcttgtcttctcagtgaatcagcaagtacaggaaatatgtgaaccagataagggaaagagggctgtgataggagttgtttacccctcagggcttggagtctctcccaaccctgggctggtactggggtttttctaggtgtgagggacagagtaattggaatggagtaggagagtgtagcacaagaaagttgttgctgttttaacacagactgcacaaacaaactttccctcccctgtggcaacgttaagcccttttattattgatccatttatttttcttagggagggaagctatagaaaaaaagcaatagatgcttagtattgaatcctgttttacattcatcgtggccaaaagacataatcaaggaggcagcattaactcagacacagagtgttgccttgttaattttttttagcagtaattacatcacattttaacttgtaatatgttgaaaggccaaatattaatctgttactgtattttgccttctttgtgcacctcctccctctactatagcagacactgggaatttgactgtattttttattactttttaagccaatgtccaaggtgtctggtatgacacatccggtgaccacacagaagcatgccctgtcctctgagttttccccataccagctctttatgctggtaaactggggataggatagaaacactcagcccagcaggttacttcataagctgacggacacagagctggtgatgaaatctataagaatgtgtttgaaatgaccctaccaaggtttcctcaggccagtactaaataacacactctgggccaggcatggtggctcatacttgtgagcttcccagcacttcaggaacccggggcgggagggtcacttgaggccaggagtttgagaccagcctgggccacatagcaagaccctgcctctacaaaaataaggataaaaaagtagtcaggtgtgatggtgcatgtgtcagcatctcgggaggctaactaggaggatcacttgggcccagaggttcaaggctgcagtgagccatgatcaagccatgtactccagcctaagtgatcgactgagaccctgttgcaaaaaaaaaaaaaaaa

SEQ ID NO: 27942 - DNA, 4338 bp, Homo Sapiens
aaactaggggcaaggagacgaagagaacatgaaagttaaactttaagatgaagaacaaagctgaacatactgatgcattggatctttggagaggatctcagaactcattgtacttaatttacaggctaaaaccttagaagaggaatttattatatcctacacaagactccagggaagcacatggccttggactgaaggctggcatctggaagctgtcagccaccagcaccttctgcagcaggaaaaggccagggctctgctggagcaggcagcagagtggacgcacagtaacatgggcaacttgaagagcgtggcccaggagcctgggccaccctgcggcctggggctggggctgggccttgggctgtgcggcaagcagggcccagccaccccggcccctgagcccagccgggccccagcatccctactcccaccagcgccagaacacagccccccgagctccccgctaacccagcccccagaggggcccaagttccctcgtgtgaagaactgggaggtggggagcatcacctatgacaccctcagcgcccaggcgcagcaggatgggccctgcaccccaagacgctgcctgggctccctggtatttccacggaaactacagggccggccctcccccggccccccggcccctgagcagctgctgagtcaggcccgggacttcatcaaccagtactacagctccattaagaggagcggctcccaggcccacgaacagcggcttcaagaggtggaagccgaggtggcagccacaggcacctaccagcttagggagagcgagctggtgttcggggctaagcaggcctggcgcaacgctccccgctgcgtgggccggatccagtgggggaagctgcaggtgttcgatgcccgggactgcaggtctgcacaggaaatgttcacctacatctgcaaccacatcaagtatgccaccaaccggggcaaccttcgctcggccatcacagtgttcccgcagcgctgccctggccgaggagacttccgaatctggaacagccagctggtgcgctacgcgggctaccggcagcaggatggctctgtgcggggggacccagccaacgtggagatcaccgagctctgcattcagcacggctggaccccaggaaacggtcgcttcgacgtgctgcccctgctgctgcaggccccagatgatcccccagaactcttccttctgccccccgagctggtccttgaggtgcccctggagcaccccacgctggagtggtttgcagccctgggcctgcgctggtacgccctcccggcagtgtccaacatgctgctggaaattgggggcctggagttccccgcagcccccttcagtggctggtacatgagcactgagatcggcacgaggaacctgtgtgaccctcaccgctacaacatcctggaggatgtggctgtctgcatggacctggatacccggaccacctcgtccctgtggaaagacaaggcagcagtggaaatcaacgtggccgtgctgcacagttaccagctagccaaagtcaccatcgtggaccaccacgccgccacggcctctttcatgaagcacctggagaatgagcagaaggccagggggggctgccctgcagactgggcctggatcgtgccccccatctcgggcagcctcactcctgttttccatcaggagatggtcaactatttcctgtccccggccttccgctaccagccagacccctggaaggggagtgccgccaagggcaccggcatcaccaggaagaagacctttaaagaagtggccaacgccgtgaagatctccgcctcgctcatgggcacggtgatggcgaagcgagtgaaggcgacaatcctgtatggctccgagaccggccgggcccagagctacgcacagcagctggggagactcttccggaaggcttttgatccccgggtcctgtgtatggatgagtatgacgtggtgtccctcgaacacgagacgctggtgctggtggtaaccagcacatttgggaatggggatcccccggagaatggagagagctttgcagctgccctgatggagatgtccggcccctacaacagctcccctcggccggaacagcacaagagttataagatccgcttcaacagcatctcctgctcagacccactggtgtcctcttggcggcggaagaggaaggagtccagtaacacagacagtgcaggggccctgggcaccctcaggttctgtgtgttcgggctcggctcccgggcatacccccacttctgcgcctttgctcgtgccgtggacacacggctggaggaactgggcggggagcggctgctgcagctgggccagggcgacgagctgtgcggccaggaggaggccttccgaggctgggcccaggctgccttccaggccgcctgtgagaccttctgtgtgggagaggatgccaaggccgccgcccgagacatcttcagccccaaacggagctggaagcgccagaggtaccggctgagcgcccaggccgagggcctgcagttgctgccaggtctgatccacgtgcacaggcggaagatgttccaggctacaatccgctcagtggaaaacctgcaaagcagcaagtccacgagggccaccatcctggtgcgcctggacaccggaggccaggaggggctgcagtaccagccgggggaccacataggtgtctgcccgcccaaccggcccggccttgtggaggcgctgctgagccgcgtggaggacccgccggcgcccactgagcccgtggcagtagagcagctggagaagggcagccctggtggccctccccccggctgggtgcgggacccccggctgcccccgtgcacgctgcgccaggctctcaccttcttcctggacatcacctccccacccagccctcagctcttgcggctgctcagcaccttggcagaagagcccagggaacagcaggagctggaggccctcagccaggatccccgacgctacgaggagtggaagtggttccgctgccccacgctgctggaggtgctggagcagttcccgtcggtggcgctgcctgccccactgctcctcacccagctgcctctgctccagccccggtactactcagtcagctcggcacccagcacccacccaggagagatccacctcactgtagctgtgctggcatacaggactcaggatgggctgggccccctgcactatggagtctgctccacgtggctaagccagctcaagcccggagaccctgtgccctgcttcatccggggggctccctccttccggctgccacccgatcccagcttgccctgcatcctggtgggtccaggcactggcattgcccccttccggggattctggcaggagcggctgcatgacattgagagcaaagggctgcagcccactcccatgactttggtgttcggctgccgatgctcccaacttgaccatctctaccgcgacgaggtgcagaacgcccagcagcgcggggtgtttggccgagtcctcaccgccttctcccgggaacctgacaaccccaagacctacgtgcaggacatcctgaggacggagctggctgcggaggtgcaccgcgtgctgtgcctcgagcggggccacatgtttgtctgcggcgatgttaccatggcaaccaacgtcctgcagaccgtgcagcgcatcctggcgacggagggcgacatggagctggacgaggccggcgacgtcatcggcgtgctgcgggatcagcaacgctaccacgaagacattttcgggctcacgctgcgcacccaggaggtgacaagccgcatacgcacccagagcttttccttgcaggagcgtcagttgcggggcgcagtgccctgggcgttcgaccctcccggctcagacaccaacagcccctgagagccgcctggctttcccttccagttccgggagagcggctgcccgactcaggtccgcccgaccaggatcagccccgctcctcccctcttgaggtggtgccttctcacatctgtccagaggctgcaaggattcagcattattcctccaggaaggagcaaaacgcctcttttccctctctaggcctgttgcctcgggcctgggtccgccttaatctggaaggcccctcccagcagcggtaccccagggcctactgccacccgcttcctgtttcttagtcgaatgttagattcctcttgcctctctcaggagtatcttacctgtaaagtctaatctctaaatcaagtatttattattgaagatttaccataagggactgtgccagatgttaggagaactactaaagtgcctaccccagcccaaaaaaaaaaaaaaaa

SEQ ID NO: 27943 - DNA, 4590 bp, Homo Sapiens
gttggtccttgagcgcgtccgacagtctgtctgttcgcgatcctgccggagccccgccgccgccggcttggattctgaaaccttccttgtatccctcctgagacatctttgctgcaagatcgaggctgtcctctggtgagaaggtggtgaggcttcccgtcatattccagctctgaacagcaacatggggtgcaaagtcctgctcaacattgggcagcagatgctgcggcggaaggtggtggactgtagccgggaggagacgcggctgtctcgctgcctgaacacttttgatctggtggccctcggggtgggcagcacactgggtgctggtgtctacgtcctggctggagctgtggcccgtgagaatgcaggccctgccattgtcatctccttcctgatcgctgcgctggcctcagtgctggctggcctgtgctatggcgagtttggtgctcgggtccccaagacgggctcagcttacctctacagctatgtcaccgttggagagctctgggccttcatcaccggctggaacttaatcctctcctacatcatcggtacttcaagcgtagcgagggcctggagcgccaccttcgacgagctgataggcagacccatcggggagttctcacggacacacatgactctgaacgcccccggcgtgctggctgaaaaccccgacatattcgcagtgatcataattctcatcttgacaggacttttaactcttggtgtgaaagagtcggccatggtcaacaaaatattcacttgtattaacgtcctggtcctgggcttcataatggtgtcaggatttgtgaaaggatcggttaaaaactggcagctcacggaggaggattttgggaacacatcaggccgtctctgtttgaacaatgacacaaaagaagggaagcccggtgttggtggattcatgcccttcgggttctctggtgtcctgtcgggggcagcgacttgcttctatgccttcgtgggctttgactgcatcgccaccacaggtgaagaggtgaagaacccacagaaggccatccccgtggggatcgtggcgtccctcttgatctgcttcatcgcctactttggggtgtcggctgccctcacgctcatgatgccctacttctgcctggacaataacagccccctgcccgacgcctttaagcacgtgggctgggaaggtgccaagtacgcagtggccgtgggctccctctgcgctctttccgccagtcttctaggttccatgtttcccatgcctcgggttatctatgccatggctgaggatggactgctatttaaattcttagccaacgtcaatgataggaccaaaacaccaataatcgccacattagcctcgggtgccgttgctgctgtgatggccttcctctttgacctgaaggacttggtggacctcatgtccattggcactctcctggcttactcgttggtggctgcctgtgtgttggtcttacggtaccagccagagcagcctaacctggtataccagatggccagtacttccgacgagttagatccagcagaccaaaatgaattggcaagcaccaatgattcccagctggggtttttaccagaggcagagatgttctctttgaaaaccatactctcacccaaaaacatggagccttccaaaatctctgggctaattgtgaacatttcaaccagccttatagctgttctcatcatcaccttctgcattgtgaccgtgcttggaagggaggctctcaccaaaggggcgctgtgggcagtctttctgctcgcagggtctgccctcctctgtgccgtggtcacgggcgtcatctggaggcagcccgagagcaagaccaagctctcatttaaggttcccttcctgccagtgctccccatcctgagcatcttcgtgaacgtctatctcatgatgcagctggaccagggcacctgggtccggtttgctgtgtggatgctgataggcttcatcatctactttggctatggcctgtggcacagcgaggaggcgtccctggatgccgaccaagcaaggactcctgacggcaacttggaccagtgcaagtgacgcacagccccgccccccggaggtggcagcagccccgagggacgcccccagaggaccgggaggcaccccaccctccccaccagtgcaacagaaaccacctgcgtccacaccctcactgcagccaaaggtgcaattacttgacctgcagccccagcccaccctcggctctgcagccggttctccgggccctggtcacctccagacagctgcctggccggggccactaggctgcggctggccactgtgtctcctcacttctctgaacaaagcagttcctcccctaccagctcagccccgagctgccgcagcctcaggcagaacggaggtcaccttctctccttatcttgggaaccaggccttcctcccggggactgttctgggattgaaattgtgcatactccaaactttcgcagccatcttcccgctcagccccagacacccagcaatcaagccagatgagtaccacaaaacagtgtgtccccagcagctccccaccccagagccaaatgacagtagtgcacttaaaaaggaaaatcaggcctgttgtccttctccggttgcattcagttgggtcattagggccggaccctgcctgccccttggcttctcagggctttgctctgacaccatgacagctgcccggggctgagggcagctggctccactcaaatgaggaagaagggatcactcccattagggcctgctttgcttatgcatgtgtgtgcacatgcatgtaaaccagggaccttcagctcacggcctccaggcctgggccagttcttgctgctcctgccgtctcccccgactggctgtgtcctgagtaactggaacatgagactgtatctgcaggactggccccatggtggccgagtcagaagtctgtttcctgtgagtcgccaccgttcactcagtcttgccctcccatgctttggagccagtctggtggctcctgtaaggttctcaaggctggtggcagctcagtctggggtcaggacatgtcggggtcatgcgtttctggccctgacataagctgtctggcctctctgtgacatgatgaaattgaaatcaatccacagtccatgaaattgtgacactccaccagattaagttagggcataacattaacttggaaatggccatgtcatcacccctgcggctgtcctatagctgagatgcgtgggtcgcaggggaggtgatttctaggcatattgctgtcccttttgtgtatctgtcatccggatgcttcggaccccacgcctctgcaagtgggagagacccgagcatcctccccacccccatagctccagtgcacgccacccccgtcttgcctgggtcggggcctgcggccagcaccatttcacacacactccttgtagatgggagccagaggaaacctgaacgtgggtggagcgttccactgagtctacttcaggagacagaaggcccatgctgatgggggaggaggagggacgtgggcattttggacaccaggggaaatggaaatgctgctttcaaaacttagtttcctttccatttcttcctagtctggcctttgacacaaatctggtagaaagaagcctgataaattgagggcacttgtaccctccctgtgcccccagaaggttcttggagagaagtgcaagaatttgtgaacacggcggtggagggcgggtggatggccatgggctgggcctccgtatcaggcctgctcaccttgctgggagctttattctgatctcattttgaatgttccagagggagcatcataagagcccagagctccgatttccaaagagtgatattgacatttatggagattggtgttgtaacatattttgataaatactaacttattttgttggggttttggttgtctcttgtcttaggacctggtagttatttgcttgatttttttttccgttattttctacataggcaaagagaattcgagggatagacagtctccaagaaaagtgaagtggtgggagagaattgcttttttcttttttttcttttctctagtttttctttctggctgagatttccgtgcaagacagcacccaatagactatttagagttgacatttgacattttaatgggcgccatggctcattttgtagattgagaaggtgcgtctcccctgctccaagtctcatcatgacagcgtgctgacagctgggagtctgtggccttcctcacgcagaggccttaaagctggacacagaagcacgcctaggctgggcagggatgggacccatgccccctccttagaggacgggcttcctggttaggaaaggacacgtgggggtgccttgcataatagttcactggtcaccgtgcttttatgagtagtgtttttgtgcacttgccaggggttttctctctgtgtgcgaggggagtgatttaagcaatggtgtctggagtaagccttacaattttaatagactttttcttatcatatccctcatttctttccctgaaataaaaatacacacaagcaaaaaaaaaaaaaaaa

SEQ ID NO: 27944 - DNA, 3745 bp, Homo Sapiens
gagctcggcttgaggcgggcgcgggctgagagtccggggatcccgggggccagtcgcggccgggacatcgggcgctgcggccggggacccgctgctgagatagacagaatatggcagagctttctgagccagagggaccagtagattggaaggaacgatgtgtagctctggagtcccaactcatgaaatttagagttcaagcaagcaagatacgagagcttttagcagagaagatgcaacagcttgagagacaagttattgatgctgaacgtcaagcagaaaaagcttttcaacaggtacaagttatggaagataaattaaaagcagctaatattcaaaccagtgaatcagagacaagattatataataagtgtcaagatctggagtcgctaatacaggaaaaagatgacgtcattcaaaacttggaattgcaacttgaagagcagaaacaaataagaatacaagaagctaaaataatagaagagaaagcagctaagataaaagaatgggtaacagttaagttaaatgagctggaattggagaatcagaatcttcgtttgatcaaccaaaaccaaactgaagagataagaacaatgcagtcaaaactacaagaagttcaaggaaagaagtcatccactgtctctacactaaagctttcggaaggccagcgcctgagcagtttgacctttgggtgctttttatctcgagcaaggagtcctcctcaagtagtaaaatctgaggaaatgagcaagatatcatcgaaagaacctgagttcactgaaggaaaagacatggaagaaatggaaattccagaaaagtctgttgataaccaagttctagaaaacaacagaggccagagaacattgcatcaaaccccttgtggctcagaacagaatcggaaaacaagaacaagctttgccacagatggtggcatctcccagaattctggggctcctgtgagtgactggagctctgatgaggaagacgggagcaaaggaagatccaagtccagatgcacatccaccctctccagtcacacatctgaggaaggggtccagtgtagcaggatgggaagtgaaatgtatctgacagcatctgatgacagcagctctatatttgaggaagagacttttggcataaagagaccagaacacaagaagctatattcttggcagcaggaggcacagtggaaagctctaaatagtcctcttggaaagggaaattctgaattaagtaaaaaggaacaagatagttcctcggatgaactgaataaaaaatttcaatcccagagactcgattattcatcttcatcgagtgaagccaacaccccaagccctattttgaccccagctttaatgccaaagcatcctaactcactctctggaaaaggaacacaattagtgccttcatcacacctgccacccccaaagttaaggattcctaatgttttcagtataagtgtagcactagccaaaaggcacttaagccagccacagttaagctctgacaggatgtttggtacaaatagaaacgctataagcatgatacgaccactgagacctcaggaaactgatcttgatctagttgatggagacagtacagaagttttagagaatatggacacgagttgtgatgatggattattttcctatgactccttggactctccaaattcagatgaccaggaacactgtgactcagcaaagaaggtggcatacagcaaacctccaactcctcccctgcaccgttttccttcttgggaaagcagaatttatgctgtagccaaatcaggtattcgaatgtctgaggccttcaatatggagagtgttaataaaaattctgctgcaaccctttcctatactacatcaggactttatacatctctgatatacaagaacatgaccaccccagtgtatacaactttgaaggggaaggcgacccaaataagtagcagccctttcctggatgactcatctgggtcagaggaagaagacagctccagatccagctcccggacgtcagagtcagactcacgcagtaggagtgggccaggcagccccagagccatgaaacgaggtgtgtctctctcctctgtggcttctgaaagtgattatgctattcctcctgatgcttactccacagacacggagtactcacagccagagcagaagctcccaaaaacttgctcatcttccagtgataatgggaaaaatgaaccactggaaaaatctggttatttattaaaaatgagtggtaaagtcaagtcttggaagcggcggtggtttgttcttaaaggtggtgaattactttactacaaatctccgagtgatgtaattagaaaaccccagggccatattgaacttagtgcatcctgtagtattttaagaggagataacaaacaaacagttcaggtacttaacttttttttttttttttttttttttgtatcatgccagactcaattctcaattatccaacctaatggaaaggagataggataattcagtgtttctttattcactttggggggttagtttgatgccttggaagtatgtgaaactccacgaatttttggttaaaactataatgtaagttaggtgtgtgttgagtaactcccaccacactttacctttcttcctttatactcttctttcctcatatttaatctcctaggtattttcagctgtccaactgtgaagctattttaaggaagggttatctggtaaatgaattctcaataagatgttagttatataatgtactgtgaaattcaggaatgtttgtattttaatatagaatctgaaaatgacagttcttatatgaacttcagatgccataacaccaaagtgggaaatatattggtgagcagagggagtgtgctgccaagcaagtcacactgtaggggcagctgctgcccattttactcacacataaggccagtcttgccagaaatctgttaaatttaaaacacaggctgttgagatattctagtatatgtaatttaaagtcagacactttatttctgaaatgtcttcaataaccattattttcttatattgctcctttggagggtggaggacaactttgccagaaaggtacattatcaatgtttccagtgatttgtacctgaaaacctctcaaaaatttagaaaggagaatcaaggaaagctttgtctttgggcatggcagttaagaatcatttgtaagtttctgaaatttggaaaatttgcagtgtggctaatttgagactggaacattctgagttcataatatctaatcacatgttcgttccaataatttatcttcttatatgcaagatcttcttattttatttatagttgattttgtcatttgtattaagaaacctcttctttagttgctaaaactatgctattttattatagtctttaatcattctgctcctcatttcaataagtaggaacctggccgggcgcggtggctcacgcctgtaatctcagcacttcaggaggctgaggcaggtggatcatgaggtcaggagatcgagaccatcctggctaacacggtgaaaccccgtctctactaaaaattcaaaaaaaattatccgggcatggtggcaggtgcctgtaagtcccagctgctcgggaggccgaggcaggagaatggtgtgaacccaggaggcggagcttgcagtgagccaagatggcgccactgcactccagcctgggcgacagaaagagactctgtctcaaaaaaaaaaaaaaaa

SEQ ID NO: 27945 - DNA, 5144 bp, Homo Sapiens
ctcggtgcggttccgccgggcgcgaggagccgccgagacctccgcctgcgaacaaagaggaggccgtgcggggcgcggcgcccgcggagcatggcggaccgcagcctggagggcatggcgctgcccctggaggtgcgggcgcgcctggccgagctggagctggagctgtcggaaggtgacatcacacaaaaaggatatgaaaagaagaggtcaaagttaattggagcctaccttccgcagcctccgagggtggaccaagctttgccgcaagaacgccgggctcctgtcactccttcctccgcctctcgctaccaccgccgacggtcttcagggtcacgagatgagcgctatcggtcagacgtccacacggaagctgtccaggcggctctggccaaacacaaagagcggaagatggcagtgcctatgccttccaaacgcaggtccctggtcgtgcagacctcgatggacgcctacacccctccagatacctcttctggctcagaagatgaaggctcagtgcagggggactcccagggcacccccacctccagccagggcagcatcaatatggagcactggatcagccaggccatccacggctccaccacgtccaccacctcctcgtcctctacgcagagcgggggcagcggggctgcccacaggctggcggacgtcatggctcagacccacatagaaaatcattctgcacctcctgacgtaaccacgtacacctcagagcactcgatacaggtggagagaccgcagggttccacggggtcccggacagcgcccaagtacggcaacgccgagctcatggagaccggggatggagtaccagtaagtagccgggtgtcagcaaaaatccagcagcttgtcaataccctcaaacgaccgaaacgaccacctttacgagaattctttgtcgatgactttgaagaattattagaagttcaacaaccggatccgaaccaaccaaagccggagggggcccagatgctggccatgcgcggagagcagctgggcgtggtcacgaactggccgccgtcgctggaggccgcactgcagaggtggggcaccatctcgcccaaggcgccctgcctgaccaccatggacaccaacgggaagcccctctacatcctcacttacggcaagctgtggacaagaagtatgaaggtcgcttacagcattctacacaaattaggcacaaagcaggaacccatggtccggcctggagatagggtggcactggtgttccccaacaatgatccggctgccttcatggcggctttctacggctgcctgctggccgaggtggtccccgtgcccatcgaggtgccactcaccaggaaggacgcagggagccagcagataggtttcttgcttggaagctgtggagttactgtagccttgactagtgacgcctgccataaaggacttccaaaaagcccaacgggagagatcccacagtttaaaggttggccaaagctgctgtggtttgtcacagagtctaaacatctctccaaaccgccccgagactggttcccacacattaaagatgccaataacgacactgcgtatattgagtacaagacgtgtaaggatggcagtgtgctgggtgtgacggtgacgaggactgcgctgctgacacactgccaggccctgacgcaggcgtgtggctacacggaagctgaaaccattgtgaatgtgctggatttcaagaaggacgtcgggctctggcatggcatcctgacaagcgtcatgaacatgatgcatgtgatcagcatcccgtactcgctgatgaaggtgaaccctctctcctggatccagaaggtctgccagtacaaagcaaaagtggcgtgtgtgaaatcgagggatatgcattgggcattagtagcacacagagatcagagagacatcaacctctcctctctgcgaatgctgatagtggcggacggcgcgaacccctggtctatttcttcttgcgatgcatttctcaatgtcttccaaagtaaaggccttcgacaggaggtcatctgtccttgtgccagctcgccagaggccctcactgtggccatccggaggcccacggatgacagtaaccagcccccgggccggggtgtcctctccatgcatggactgacctatggggtcattcgtgtggactcggaagagaagctgtccgtgctcaccgtgcaggatgtcggcctcgtgatgcctggagccatcatgtgttcagtgaagccagacggggttcctcagctgtgcagaacggatgagatcggggagctgtgtgtgtgtgcagttgcgacgggcacgtcctactatggcctctctggcatgaccaagaacacctttgaggtgtttcccatgacaagctccggggctccgatcagtgaatacccattcataaggacaggcttgctggggttcgtgggtcccggaggcctcgtcttcgtggtgggcaagatggatggcctcatggtggtcagcgggcgcaggcacaacgccgacgacatcgtggccactgcgctggccgtagaacccatgaagtttgtctaccggggaaggatagccgtgttctcggtgaccgtgctgcacgacgagaggatcgtgatcgtggctgagcagaggcctgactccacggaagaggacagtttccagtggatgagccgtgtgctgcaggcgattgacagtatacatcaagttggagtttattgcctggccttggtgccagcaaacaccctccccaaaaccccgcttggtgggatccatttatcagaaacaaaacagctttttctggagggctctctgcacccctgcaatgtcctaatgtgcccccacacctgcgtcacaaacttgcctaagcctcgacagaagcagccagaaatcggccctgcctctgtgatggtggggaacctggtctctgggaagagaatcgcccaggccagtggcagagacctgggtcagatcgaagataacgaccaggcacgcaagttcctgttcctctcagaggtcttgcagtggagagcacagaccaccccggaccacatcctctacacgctgctcaactgtcggggtgcgatagcgaactcgctgacctgcgtgcagctgcacaagagagctgagaagatcgccgtgatgctgatggagaggggccaccttcaggacggcgaccacgtggccttggtctaccccccaggaatagacctgatagcagcgttttatggttgcctgtacgcaggctgtgtgccaataaccgtccgtcccccgcacccacagaacatcgcgacgacgttgcctaccgtcaagatgattgtggaggtgagtcgctctgcctgtctgatgacgacacagctgatctgtaagttgctgcggtccagggaggcggcggcggctgtggacgtcaggacgtggcccctcatcctggacacagatgatttgccaaagaagcggcctgcccagatctgcaaaccttgcaacccagacactcttgcatatctcgacttcagcgtgtccacaactgggatgctagctggcgtaaagatgtctcacgcagccaccagtgccttctgccgttccattaagctgcagtgtgaactttacccctctagagaagtggccatctgcctggacccttactgtggactgggatttgtcctctggtgcctctgcagtgtgtattctgggcaccagtccatcctgatcccgccctctgagctggaaaccaaccccgccttgtggcttcttgccgtgagtcagtacaaagtccgagacacgttttgctcctactccgtgatggagctgtgcaccaaggggctgggctcgcaaacagagtccctcaaggcgcgagggctggacttgtcccgagtgaggacctgcgtggttgtggcggaagagaggcctcggatcgcactcacacagtcgttctcaaagctgtttaaggacctgggccttcacccgcgggccgtcagcacctcgttcggttgcagggtgaacctggcgatttgcttgcagggaacctcaggacctgacccaaccactgtctacgtggacatgagagccctgagacacgacagagtccgcttagtggaaagaggatcccctcatagtctgcccctgatggaatcgggaaagatacttccaggggttcggattataattgccaacccagaaacaaaaggaccgctgggggactcacaccttggagagatttgggttcacagtgcccacaatgccagcggttatttcactatttacggagacgaatccctccagtcagatcacttcaactcaagactaagttttggagacacccagaccatctgggcacgcacaggctacttggggttcctgcggagaactgagctcacagatgcaaatggagagcgccatgatgccctctacgtggtaggggcactggacgaagccatggagctgcggggcatgcggtaccacccaatcgacattgagacctcggtcatcagagcccataaaagcgttacggaatgtgctgtgtttacctggacaaatttgttggtggttgtggttgagctggatgggtcggaacaagaagccttggacctggttcccttggtgaccaacgtggtcctggaggagcactacctgatcgtcggagtggtggtcgtggtggacatcggcgtcatccccatcaactcccgtggggagaagcagcgcatgcacctgcgagacgggtttttggcagaccagctagaccccatctatgtggcctacaacatgtagtctcgtctcttggcttccatggacttttctagagatgtagacattgttctccgtgtccactgaagcgtgcagacacagggcaacactcaccagaatacagccatttgtggtgagagtggaggaggaagaggaggaggaagaggacttctcacagcagccacgattggcatgggggtgaaatgtgaatttaccactgaatttcgctcagaaggactttggattactgccttcagtttgttggaaaagcccatttcaaaaactttcttttcttttctttcttttttaattattggataataagtgctttcttcgtaaatgtggtattttgttaagccgaaatagcaattaaaaaaatatcctgccctccaaaaaaaaaaaaaaaa

SEQ ID NO: 27946 - DNA, 1294 bp, Homo Sapiens
gggcgccaggctagggcggcctggccactgagccggggtgcagtggcagcgggagagtacctggcgatggcgatatgagcggtgcgggggtggcggctgggacgcggccccccagctcgccgaccccgggctctcggcgccggcgccagcgcccctctgtgggcgtccagtccttgaggccgcagagcccgcagctcaggcagagcgacccgcagaaacggaacctggacctggagaaaagcctgcagttcctgcagcagcagcactcggagatgctggccaagctccatgaggagatcgagcatctgaagcgggaaaacaaggatctccattacaagctcataatgaatcagacatcacagaagaaagacagcctctccatgtcaagcttccagtctgtcaagtccatctctaattcaggcaaggccaggccccagcccggctccttcaacaagcaagattcaaaagctgacgtctcccagaaggcggacctggaagaggagcccctacttcacaacagcaagctggacaaagttcctggggtacaagggcaggccagaaaggagaaagcagaggcctctaatgcaggagctgcctgtatggggaacagccagcaccagggcaggcagatgggggcgggggcacaccccccaatgatcctgccccttcccctgcgaaagcccaccacacttaggcagtgcgaagtgctcatccgcgagctgtggaataccaacctcctgcagacccaagagctgcggcacctcaagtccctcctggaagggagccagaggccccaggcagccccggaggaagctagctttcccagggaccaagaagccacgcatttccccaaggtctccaccaagagcctctccaagaaatgcctgagcccacctgtggcggagcgtgccatcctgcccgcactgaagcagaccccgaagaacaactttgccgagaggcagaagaggctgcaggcaatgcagaaacggcgcctgcatcgctcagtgctttgagccaccccaatctggtcagtgccaggcccaccaacctgcagctggagactggctctctatagcatttcctgatacttccgctacttttaggcctggctaaattccaagacagataacactcaagatagataaagtacttgatctccaaactgacaaactgtttattttctagctgttattttgctatttggcatttacataaaagcacacgatgaagcaggtatcgccttacctgttgaaactgaaaataaagcttgtttatttccaaaaaaaaaaaaaaa

SEQ ID NO: 27947 - DNA, 1650 bp, Homo Sapiens
cccaaacacctcctctttctctcggtgattggccaagaggcagttcccatagtaactgacaccgcgctcccacttcccagcctggaggacagcaccggccctcgtattagcaacctggaagagagggcgcccaggtgggcactcgcaacttctcacgtatctgcgcgttctcttcgctcccactggcgtgagcctgcgctttccgccttccttccctcacaagcccccttggcaaccgtcgccgttgagacggagggagacgcccccacggattcgccccgccgcgcctctccgcgcgtagattggccggagcgaggcgaacgggcccggccttggtagccgccgaccgagcgctggctgtcctggaacctaggcggcgggagcccggggcgcctcgcggcacggaagagcggcgagatgctcaaccgcaagaccagccactttttgggaatgagggtgcagtcggagcttgaacatctctccgagctgcggcgggaagcggggaaggatcgcagctcagtgcatgggtcggccgcgcggacgcgtgcgagtgtgcggactcagtggacgacggcggcggcggcgaaagcggatgaagaccccggagccaacttgtttccgccgccgctgccccgaccccggatctgcatgtggaagtacctggacgtccattccatgcaccagctggagaagaccaccaatgctgagatgagggagtagggactgaggggggcgtgggaagagctcttggcaaaggctgaggggtcaggttgggaaaacatgaggaatggctgactccaaagcatgtggtgggtgtagggtgatgaaaggaggcccagttgtcactcactcctctctccctcccaagggtgctggctgagctgctggagctagggtgtcctgagcagagcctgagggacgccatcaccctggacctcttctgccacgcgctcattttctgccgccagcagggcttctcactggagcagacgtcagcggcttgtgccctgctccaggatcttcacaaggcttgtattgcatcgacctcttcaaagaggaacagctgctggccttggaagactacgtggtcaacacttacttccgccacttcaagctctataaatacgtcttcacaccccaggtgcggctggatctgtctttgacttacatggggctacagccacccaaactgtggccagagagtgagacggagaaagaagaaagcaaggagatggaggagcaggcagttaccccgcagaaagaggaactagagacagtggccccaccagagccagagccaagccacatccacgtcctccgagcctacatcaagacccaagtgaacaaagagctggagcagctccaggggctggtggaggagcggctcaaggccagcgaggaaaggctcagcagcaagttgactgcactagagcggcccttccagctacctccgggtaaaggcaagagcaagaccaagtgacccccaacattttccccaataaaggtctgggccagaatggcaccatccctgcaaaaaaaaaaaaaaaaaaaaaaaaaaaaaaaaaaaaaaaaaaaaaaaaaaaaaaaaaaaaaaaaaaaaaaaaaaaaaaaaaaaaaaaaaaaaaaaaaaaaaaaaaaaaaaaaaaaaaa

SEQ ID NO: 27948 - DNA, 2015 bp, Homo Sapiens
cccggaccgaggcaggacctcaccccgcgcgtgttccccgggcgcccctctgcgaaccccaggcccttcccaggtttgcgcgcgggggccatccagaccctgcggagagcgaggcccggagcgtcgccgaggtttgagggcgccggagaccgagggcctggcggccgaaggaaccgccccaagaagagcctctggcccgggggctgctggaacatgtgcggggggacacagtttgtttgacagttgccagactatgtttacgcttctggttctactcagccaactgcccacagttaccctggggtttcctcattgcgcaagaggtccaaaggcttctaagcatgcgggagaagaagtgtttacatcaaaagaagaagcaaactttttcatacatagacgccttctgtataatagatttgatctggagctcttcactcccggcaacctagaaagagagtgcaatgaagaactttgcaattatgaggaagccagagagatttttgtggatgaagataaaacgattgcattttggcaggaatattcagctaaaggaccaaccacaaaatcagatggcaacagagagaaaatagatgttatgggccttctgactggattaattgctgctggagtatttttggttatttttggattacttggctactatctttgtatcactaagtgtaataggctacaacatccatgctcttcagccgtctatgaaagggggaggcacactccctccatcattttcagaagacctgaggaggctgccttgtctccattgccgccttctgtggaggatgcaggattaccttcttatgaacaggcagtggcgctgaccagaaaacacagtgtttcaccaccaccaccatatcctgggcacacaaaaggatttagggtatttaaaaaatctatgtctctcccatctcactgactaccttgtcattttggtataagaaatttgtgttatttgataggccgggcatggtggctcatgcctgtaatcccagcactttgggaggccaggagttcgagaccagcctggccaacatggtgaaacccggtctctactaaaaattcaaaaattacctaggcgtcatggggcatgcctgtagtcccacctacttgggaggctgaagcaggagaattgctcgaacctgggaggcagaggttgcagtaagctgagatcacgccactgcattccagcctgggcgacagagcaagactccatctcaaaaataaaataaaaaaagaaagaaagaaaagaagaagaaaagagaagaaggagaaggagatgaaggaggaggaggaggagaaggagaagaagaagaagaagaagaccacaaaagacatgactatccaactttttatgacaaactgcaaggaataaaggaagaataagtccatgtactgtaccacagaagttctgtctgcatcttggacctgaacttgatcattatcagcttgataagagactttttgactctatatccttgcagttaagaagaaagcacttttttgtaatgtttgttttaatggttcaaaaaaaatctttcttataaagagcataggtagaattagtgaactctttggatcctttgtacagataaaggttatagatttcttgtgttgaatattaaaaaagcaaggatgtctaaccattaagattatccaaagtcaggctgggcgcagtggctcacgcctgtaatcccagcactttgggagggataggtgggcggatcacctgaggtcaggagtttgagaccagcctggccaacatggcaaaaccccgtctctacaaaaatacaaaagaaattagccagacatgatggcgggtgcctctaatcccagctactggggaggctgaggtgggagaatcgcttgaactcgggaggtggaggttgtagtgaggcgagattgtgccattgcactccaacctgggcgacagagtgagactccatctcaaaaaaaaaaaaaaaaaaaaaaaaaaaaaaaaaaaaaaaaaaaaaaaaaaa

SEQ ID NO: 27949 - DNA, 1963 bp, Homo Sapiens
tgaagtctcagagctgccaccagcagcaggctcagacactgggctcccagctggggactgctccatggccatggagatagacagcaggcctggggggctccccggcagtagctgcaacctaggtgcagcccgagaacacatgcaggcggtcacccgaaactacatcacccacccccgtgtcacctacaggactgtgtgcagtgtgaacgggcccctggtggtgctggaccgggtcaagtttgcccagtatgcggagatcgtccacttcaccctcccagatgggactcagaggagcgggcaggtgcttgaggtggctggcaccaaggcgattgttcaggtgtttgaagggacatcagggatcgatgccaggaagaccacttgcgaatttacaggggacatcctacgaactccggtgtcagaggacatgctgggtcgggttttcaatggctccggcaagcccattgacaaggggccagtggtcatggcggaggactttctggatatcaatggccagcccatcaacccgcactcccgcatctaccccgaggagatgattcagacgggcatttctcctattgacgtcatgaacagcattgcccgcggccagaagatccccatcttctcagcagccgggctcccccacaatgagattgccgctcagatctgccgccaggcggggctggtgaagaagtccaaggctgtgctggattaccatgacgacaacttcgccatcgtctttgcagccatgggggtgaacatggagacagccagattcttcaagtctgactttgagcagaatggaaccatggggaacgtctgcctcttcctgaacttggccaatgaccccacgatcgagcggatcatcaccccgcgcctggcgctgaccactgctgaattccttgcctaccagtgtgagaagcatgtgctggtcatactgacggacatgagttcctatgcagaggccttgcgggaggtctctgctgctagagaggaggtgcctgggcgccgagggtttcctggatatatgtacacagacctggccaccatctacgagcgggcgggccgtgtggagggtcggggaggatccatcacacagatccccatcctcaccatgcccaacgacgatatcacccaccctatcccagacttgacgggcttcatcacagagggacagatctacgtggacagacagcttcacaacagacagatctacccccccatcaacgtgctcccttccctgtcgcggctgatgaagtcagccattggggaaggcatgacaagaaaggaccatggagatgtctccaaccagctgtacgcctgctatgccatcgggaaggacgtgcaggccatgaaggcagtagttggggaggaggcgctcacctctgaggacctgctctacctggaattcctgcagaagtttgagaagaacttcatcaatcagggcccctacgagaaccgctcggtgttcgagtcgctggacctgggctggaagctgctgcgcatcttccccaaggagatgctgaagcgcattccgcaggccgtgatcgacgagttctattcccgcgagggggcgctgcaggacctcgcgcctgacactgcgctctagccccgcgcgccgtggcaccccaacaccggcagggaacctaccctcggctcccgggtctcccctccctcgccaccccaaccagcggcttctgcgccgccctccgccctccgctggctccgaggtggtgggggcgccgcacgctccatccctttccctcgctcgattccttttcccgcgctccatgcctccccctcgactcccggtgctgcggaagaactgaaggttgcgatgccttactctgacgggagcatctgtatttttatgttaaaagcccacaaaataaaaataaaaagtaactgagatgaaaaaaaaaaaaaaaaaaaaaaaaaaaaaaaaaaaaaaaaaaaaaaaaaaaaa

SEQ ID NO: 27950 - DNA, 2581 bp, Homo Sapiens
gctggagcaaccaagcagggcctacaagccgaggagggctgtttaaaggcgcaggggccattttaccctccaggttggccctgctcaggaccaggaggaaacacctccagcccgcgacctcctcccacagggggaaaaggaaagcaggaggaccacagaagctttggcaccgaggatccccgcagtcttcacccgcggagattccggctgaaggagctgtccagcgactacaccgctaagcgcagggagcccaagcctccgcaccggattccggagcccaagcctccgcaccggattccggagcacaagctccaccgcgcatgcgcacacgccccagacccaggctcaggaggactgagaattttctgaccgcagtgcaccatgggaagctctgaagtttccataattcctgggctccagaaagaagaaaaggcggccgtggagagacgaagacttcatgtgctgaaagctctgaagaagctaaggattgaggctgatgaggccccagttgttgctgtgctgggctcaggcggaggactgcgggctcacattgcctgccttggggtcctgagtgagatgaaagaacagggcctgttggatgccgtcacgtacctcgcaggggtctctggatccacttgggcaatatcttctctctacaccaatgatggtgacatggaagctctcgaggctgacctgaaacatcgatttacccgacaggagtgggacttggctaagagcctacagaaaaccatccaagcagcgaggtctgagaattactctctgaccgacttctgggcctacatggttatctctaagcaaaccagagaactgccggagtctcatttgtccaatatgaagaagcccgtggaagaagggacactaccctacccgatatttgcagccattgacaatgacctgcaaccttcctggcaggaggcaagagcaccagagacctggttcgagttcacccctcaccacgctggcttctctgcactgggggcctttgtttccataacccacttcggaagcaaattcaagaagggaagactggtcagaactcaccctgagagagacctgactttcctgagaggtttatggggaagtgctcttggtaacactgaagtcattagggaatacatttttgaccagttaaggaatctgaccctgaaaggtttatggagaagggctgttgctaatgctaaaagcattggacaccttatttttgcccgattactgaggctgcaagaaagttcacaaggggaacatcctcccccagaagatgaaggcggtgagcctgaacacacctggctgactgagatgctcgagaattggaccaggacctccctggaaaagcaggagcagccccatgaggaccccgaaaggaaaggctcactcagtaacttgatggattttgtgaagaaaacaggcatttgcgcttcaaagtgggaatgggggaccactcacaacttcctgtacaaacacggtggcatccgggacaagataatgagcagccggaagcacctccacctggtggatgctggtttagccatcaacactcccttcccactcgtgctgcccccgacgcgggaggttcacctcatcctctccttcgacttcagtgccggagatcctttcgagaccatccgggctaccactgactactgccgccgccacaagatcccctttccccaagtagaagaggctgagctggatttgtggtccaaggcccccgccagctgctacatcctgaaaggagaaactggaccagtggtgatgcattttcccctgttcaacatagatgcctgtggaggtgatattgaggcatggagtgacacatacgacacattcaagcttgctgacacctacactctagatgtggtggtgctactcttggcattagccaagaagaatgtcagggaaaacaagaagaagatccttagagagttgatgaacgtggccgggctctactacccgaaggatagtgcccgaagttgctgcttggcatagatgagcctcagcttccagggcactgtgggcctgttggtctactagggccctgaagtccacctggccttcctgttcttcactcccttcagccacacgcttcatggccttgagttcaccttggctgtcctaacagggccaatcaccagtgaccagctagactgtgattttgatagcgtcattcagaagaaggcgtccaaggagctgaaggtggtgaaatttgtcctgcaggtccctcgggagatcctggagctggagcatgagtgtctgacaatcagaagcatcatgtccaatgtccagatggccagaatgaatgtgatagttcagaccaatgccttccactgctcctttatgactgcacttctagccagtagctctgcacaagttagctctgtagaagtaagaacttgggcttaaatcatgggctatctctccacagccaagtggagctctgagaatacaacaagtgctcaataaatgcttgctgattgactgatggattaaaaaaaaaaaaaaaaaaaaaaaaaaaaaaaaaaaaaaaaaaaaaaaaaaaaaaaaaaaaaaaaaaaaaaaaaag

SEQ ID NO: 27951 - DNA, 3610 bp, Homo Sapiens
ttttttgattccttcttatttggagaaatctccagctgctctgatgatagcctaagaagactgcatgctgcttcctctcgatgccaagccagaccctctcacaacctcggatctcagtccttcatggagacctggtcccagcaggaatggcagtgcaggaaattggcgcccagatggttcttccatgtgaagttgtctcgggctctgggctgacgagagaacacctggtaaccaggttagccctctgtcagtcacccagggcagggcagcatggtgcggattcagaggaggaagcttttggcatcttgcctgtgcgtcacagccaccgtctttctgcttgtcacactccaggccttggataccgttgagaatctaatgaaagtcacgggccctccccagggagttacagactccatgcaatgcttcaatgatcagcggcctttatctaacaccaggagcagcgagcacataaaagaggtcatggttgagctggggaagtttgaaaggaaggagtttaaaagttccagtttgcaagatggacatacaaaaatggaggaagcacctacgcatcttaattcatttcttaagaaagaaggattgaccttcaacaggaaaagaaaatgggaattggacagctaccccattatgctctggtggtccccgctgacgggggagactgggaggttaggccaatgtggagcagatgcttgtttcttcaccatcaaccggacctacctccatcatcacatgaccaaagcattcctcttctatggtactgactttaacatagatagcttacctctgcctcggaaagcccatcatgactgggctgtttttcatgaagagtccccgaaaaacaattataagctctttcataaaccagtgatcaccttgttcaactacactgccacgttcagcaggcattcccacttgccactaactacccaatacttggagagcattgaagtcctgaagtcactccgatacctagttcctttgcagtccaaaaacaagcttagaaaaagacttgctccgctggtgtatgtacagtcagactgtgacccaccatcagacagggacagctatgttcgcgagctgatgacttacatcgaggtcgattcctatggtgaatgtttacgaaacaaagacctccctcagcagctgaaaaatccagcctctatggatgccgatggcttttataggatcattgcacagtataagtttatcctagcttttgagaatgcagtttgtgatgactacatcactgagaagttctggaggccactgaaactgggggtagtccctgtatattacggatcccccagcatcacagactggcttccaagtaacaaaagtgctattcttgtatcagaattttctcaccccagggaactggcaagttatatcagacgactggattctgatgacagattgtatgaggcctatgtagaatggaagctgaagggtgagatctctaaccagcgacttctgacagctgtcagggaaccgaaatggggagtgcaagacgtcaaccaggacaattacatcgacgcatttgagtgtatggtgtgcaccaaggtgtgggctaatatcaggcttcaggaaaagggcttaccacccaaaagatgggaggcagaagatacccacctgagttgcccagagcccacagtgtttgctttctcaccactccggactccacctttgagctctttgcgagagatgtggatttccagctttgaacaatccaagaaagaagcccaggcactaaggtggctggttgataggaatcaaaacttttcatctcaagagttttggggcctagtattcaaggactgatttcaaaaatgatcagaatgaaacagactagagccttcttgaggtttattttctaggttgccttaatatttgaacataatagctattctgttgactatccatcaggataataattagttgctgcagtactcataatgagccctttcaaggaatagatgtaaattacccttaggggtagccactatattttttatactaaaaaaggaaatatttcttatggacactggttatcttccatgtccgtgtctgtggacccacatacttactgccttttgtggaaattcacctagagtgagtactttccttgtgcaatggagggagacgatctagctatagattcttgatactcacctcactctcaacagcttattggtatttggcaaacctggtatcctgcagccgagcatgaacatgaaatacattagaacttggcaatgagagatcccatctgttggtttccagggatgtaagtgagtaataaaagctgtttcaagtttatccactatccactcttcaagtgaaaagaacttatgtgtgtctaccttcttctccataccctgagccacctctctcactttctttagttgtgccttgccctatcgcctcccattttcccttcaaagtagaatgtcttgtaaagacacagtaactcctgtgtgttttgattagtgagatgttaccacttaccccttctgctgcgcagaataatattaagaattgctatgcttatgattcaggctggacagcctggacattttgagcagcgcgagagtagaagtgaatacccccaggaactccaattgtgctgaagctgatttgtctgttcgtaggatgatgtgcagcctgtcacagtggcagccacaggcattcagtttgtgggcatttcctgtcatttcggatcctgctatagggaaggttcagctctcctgtctggggcatctactggagcacctcagaagacaaggaggaaaacactggctcatgttttctttccatgtgagggaggggaggtttctagatgatactaaaagcctgttgccactgttgtgtcatgatttccattcttcatcatggaaagccacaagcctcagaaggcagccagaggacaggaagagtctgtgatgctcatgtctgtgtcatggcatgagggggaattgacgagtgcttgcttagcatcagctctcattgtattgaaggctgtgcccttggtgtgcttagcagtgagcagcgtcttcattaggtagctctggctgggctttgtcagccagcgtgtgagaaaggagaaccaaaaccaatacctccttatagaagccagaaggatcacattggatgagagaaggtgtctataactgggttcttcccaatcccagctctttcattaactaaatatgatcttggacatatctcttaacctccatcggccttagtttttgcatccaaaaagaagtgattgggctggtcttggaaggtttttttcttttttttcccctgtgtaacattcttcattgttcatcaacatttaagaaatttaattttgtagatgtttttactaaagagggtaacaaactattttggaactgctgtatgttattcaagggaagcacgctgtttggaggaaggagcatacttaatgggtagtattgaggatgaaagggaatttctctctctgccattttatttgataatattaaagaaataaagactggaaagggggattccttgttaaaggtcagattttaaattgcatataaaaaaaaaaaaaaaaaaaaaaaaa

SEQ ID NO: 27952 - DNA, 1763 bp, Homo Sapiens
gccggagcaacccccaggtctttactttacaatcggcaatttgacttgctctgctgcatgtctggagggaccaaggaaagtgtggagacgctccaaggattaggtgatcggagcttgaaaagaaaaaaagccaaacaaataaacaaaacccacccaccctaacaaatatgaggctgctggagagaatgaggaaagactggttcatggtcggaatagtgctggcgatcgctggagctaaactggagccgtccataggggtgaatgggggaccactgaagccagaaataactgtatcctacattgctgttgcaacaatattctttaacagtggactatcattgaaaacagaggagctgaccagtgctttggtgcatctaaaactgcatctttttattcagatctttactcttgcattcttcccagcaacaatatggctttttcttcagcttttatcaatcacacccatcaacgaatggcttttaaaaggtttgcagacagtaggttgcatgcctccgcctgtgtcttctgcagtgattttaaccaaggcagttggtggaaatgaggcagctgcaatatttaattcagcctttggaagttttttggtaagtaaacatagtttaacttgtctattacaacttttgctgtgatattgtgtatatgaaagatttagtgaaagctggatttgttttactctttggttaagtataaaaattgttgaatcttttcatgtgccagtatccataccctgaagaaaagtagttaatgaataaagcaaatgttctcttacaatatattttggaggtttgggttttaaaattccatttaatgaattcaaggaatcaattaaaacactatgtgtctccttatagaggttatgtcaatatattgatcatttaatgaggtcttttagattattattattttgtatcatgggactgaggattttgaaaaggaaacatgacccagctggtcagaaagggaatgctaatttacttgttgacatgccatttattttgtacatttcactgtcaaagaagctactggcttggatgcttctgagaaatctatgtgaaaaaaaatttgaaaggaagatatgactaatgagtaatttgcaagtaaatgttgtatctatatatatatatatatataaagattcaaaagtagttcagctttcataagtagaaccaatataaggacgttgttttagcatttttaatcattatttttaaataaatgatgtaacagaggcttgatttgtgttatgaaagattgagaaactaaattttctgttgatttaatttttttgtgccttaaaactttgttaaattcctgaagttaattatcatattgtattttttggggcataactcattagcagatatgtagtgcagtgatttacaaataattgagagtaaaatcagtgatgtataaactagttcatgagtctaggtaaaatatcaattacctctgtttaaaatgctctgttaattagtattgtatgtatttaaatgtagttaaagcttttaaacatgttgttacatagtgttaattctacatagtgctacacagcttttagtgtcacatagccttacagagtttataatgatgtagcatctgcaaaatatatgcatagcttatatcctatttttatagagccagtaatggtttttgtgatgctgtattacttctgggttttagacaataaagtctgtttaacaaaaaaaaaaaaaaaaaaaaaaaaaaaaaaaaagaaaaaaaaaaaa

SEQ ID NO: 27953 - DNA, 2700 bp, Homo Sapiens
cccggaagtgcttggccacagtcgcagccccggcgccccgaagcgggaaaaaggctgggtgccgccgtcccccagctgcgcaaccctaggaactctcgggtaggtgggttccgtgtaacggtcagtgtttccggggctccttttcctctgctgcctcccgcagacccaaggctgagtgaggggcggcggcggaagtgggaggcccacccaaaaagccaaatggggtgccagaagagtgaaggcgcaccctggggtcaccctaccctaccccgtcccctcccagccccactctgcgggcgggcgctgcccttttgggcgtcgcagaccctccaaccccggcggcggccttaagattcccgggctgggatccctgctgcagagtgggtaacggtgtctggcttgccaagcaatatttgttgtggtctatcatggaagaaataaagtcgggcaatatgaattttttttttctcaaatttgccggatggctgtggtgtttctgactcttagttttctcattgtgaaaaaggaatgattatcttcttcgatcctctcaagagtttccttgttttgagtagattgatagctctttaaaggatgctaagctcagctaatggaagaagagtctagtttctttgaggctttgattttggttaaactatagagctcatacctttctgtatggtgcagcttactattgtctttggattggtaacttaaaaaatacaaataacatgcctttgagaaccaataaaaactatggatattatccctataaatttacacaaatccagatataagcatgcaatgtgatatacctaagggatatgtgaaccactgagttaagaactgctttagagggagatacaatgtgagacacaggctttgggataagactttggtttgaatcctggctctgctctgttaccttagggcaaagttacttaagcatcttgaatctcagcttttttaccaaagcaggactaatactaacttacaaggtggtgaggattaagtgaaagaagatacataaggcacttagcacatagtaggtactcaataagcgatagctaacagatgtctattattattcaaggaattataattttcaaatctgaaatgcagttttaatgtcccataaggtgactaccacatacatttttctcagacttttagtaaactgagttgatttgactttatctcagtactactcttgacctttcacaactttcgtaggttcacagtctctctttttctaggaacttggctgtgttgtcctgcctcagagacaaattcatctattgtaggcctagcccctgcctttgaaaacaaggaaaggttggtagaacatcaacacagcatggaatttccagggaggtctcatttcaaaacttcataaagaacaagaaccacctggacttctgtgagggcgatgattaaactggcctgagtttgaatgaagggataatgtatgctcaacctgtgactaacaccaaggaggtcaagtggcagaaggtcttgtatgagcgacagccctttcctgataactatgtggaccggcgattcctggaagagctccggaaaaacatccatgctcggaaataccaatattgggctgtggtatttgagtccagtgtggtgatccagcagctgtgcagtgtttgtgtttttgtggttatctggtggtatatggatgagggtcttctggccccccattggcttttagggactggcctggcttcttcactgattgggtatgttttgtttgatctcattgatggaggtgaagggcggaagaagagtgggcagacccggtgggctgacctgaagagtgccctagtcttcattactttcacttatgggttttcaccagtgctgaagacccttacagagtctgtcagcactgacaccatctatgccatgtcagtcttcatgctgttaggccatctcatcttttttgactatggtgccaatgctgccattgtatccagcacactatccttgaacatggccatctttgcttctgtatgcttggcatcacgtcttccccggtccctgcatgccttcatcatggtgacatttgccattcagatttttgccctgtggcccatgttgcagaagaaactaaaggcatgtactccccggagctatgtgggggtcacactgctttttgcattttcagccgtgggaggcctactgtccattagtgctgtgggagccgtactctttgcccttctgctgatgtctatctcatgtctgtgtccattctacctcattcgcttgcagctttttaaagaaaacattcatgggccttgggatgaagctgaaatcaaggaagacttgtccaggttcctcagttaaattaggacatccattacattattaaagcaagctgatagattagcctcctaactagtatagaacttaaagacagagttccattctggaagcagcatgtcattgtggtaagagaatagagatcaaaaccaaaaaaaatgaaccaaaggcttgggtggtgagggtgcttatcctttctgttattttgtagatgaaaaaactttctggggacctcttgaattacatgctgtaacatatgaagtgatgtggtttctattaaaaaaataacacatccaaaaaaaaaaaaaaaaaaaaaaaaaaaaaaaaaaaaaaaaaaaaaaaaaaaaaaaaaaaaaaaaaaaaaaa

SEQ ID NO: 27954 - DNA, 2307 bp, Homo Sapiens
ctcccggccgggctgactcaagcggaggcgcgcggaacagtcgccgaggcgattcccgcccaggctcctgtaaccgccaggcagcggccccgccatgtcccagccccggaccccagagcaggcactggatacaccgggggactgccccccaggcaggagagacgaggacgctggggaggggatccagtgctcccaacgcatgctcagcttcagtgacgccctgctgtccatcatcgccaccgtcatgatcctgcctgtgacccacacggagatctccccagaacaggtaacggggcaggctgtgctctgcgtggtgtggccctgcgaagatatagggtccccgaggctcaacctggcacagggtgctgaccctgcacgcctcgaagcttctgaggcttaggaggcagaggcgggaggcgggggcctccttggaaagggagggagccaacaagtcctgctcagcctgtgctcaccccggcggaggtcctggcctcctgggagggtgggagactgggctcctagggctctgtttccgagttcagtggacaaaggcagcaccctggaagtgagccagaggacaggttggaagaggaaggttccgggcctgccccaaggacagaagtttcctctgcgggagggcagctgccccagcaggcaggccccttacgtagctgctctgagtaaacgcggccagcgccccgtctcagcggggacactcccaccccggctgctcctgcaggcctggagcagttcgacagaagtgtacagaggcttctggcaacacggattgccgtctacctgatgacctttctcatcgtgacagtggcctgggcagcacacacaaggttgttccaagttgttgggaaaacagacgacacacttgccctgctcaacctggccgcatcatggctgtgatgccctccctccctccaggcctgcatgatgaccatcaccttcctgccttacacgttttcgttaatggtgaccttccctgatgtgcctctgggcatcttcttgttctgtgtgtgtgtgatcgccatcggggtcgtgcaggcactgattgtggggtacgcattccacttcccgcacctgctgagcccgcagatccagcgctctgcccacagggctctgtaccgacgacacgtcctgggcatcgtcctccaaggcccggccctgtgctttgcagcggccatcttctctctcttctttgtccccttgtcttacctgctgatggtgactgtcatcctcctcccctatgtcagcaaggtcaccggctggtgcagagacaggctcctgggccacagggagccctcggctcacccagtggaagtcttctcgtttgacctccacgagccactcagcaaggagcgcgtggaagccttcagcgacggagtctacgccatcgtggccacgcttctcatcctggacatctgcgaagacaacgtcccggaccccaaggatgtgaaggagaggttcagcggcagcctcgtggccgccctgagtgcgaccgggccgcgcttcctggcgtacttcggctccttcgccacagtgggactgctgtggttcgcccaccactcactcttcctgcatgtgcgcaaggccacgcgggccatggggctgctgaacacgctctcgctggccttcgtgggtggcctcccactagcctaccagcagacctcggccttcgcccggcagccccgcgatgagctggagcgcgtgcgtgtcagctgcaccatcatcttcctggccagcatcttccagctggccatgtggaccacggcgctgctgcaccaggcggagacgctgcagccctcggtgtggtttggcggccgggagcatgtgctcatgttcgccaagctggcgctgtacccctgtgccagcctgctggccttcgcctccacctgcctgctgagcaggttcagtgtgggcatcttccacctcatgcagatcgccgtgccctgcgccttcctgttgctgcgcctgctcgtgggcctggccctggccaccctgcgggtcctgcggggcctcgcccggcccgaacaccccccgccagcccccacgggccaggacgacccacagtcccagctcctccctgccccctgctagcagccacagagcccactcccagccgtcctcaccagagatggaccagggaggacaggatgctgggcaggggaagccaagtcacgggcaggccgcagtggttcttgcgtggcctggttttattttcattgtgaaatatcatgctcttatttcagtcaaaaaaaaaaaaaaaaaaaaaaaaaaaaaaaaaaaaaaaaaaaaaaa

SEQ ID NO: 27955 - DNA, 1808 bp, Homo Sapiens
gaggaagaggccgggagaagagggctagagcaaagaccgagagccggagaaaggcgaaaggcgcggtgagcaatcgccgacgtagagagggcagccctccgcgctgcaatattgagaaggcacccgcgggacgcatgcgcacggcggacggaggcgagccggccggggcttcctccccggccggcagggtggacggtgggctccagatgggatcagagcggatggagatgcggaagcggcagatgcccgccgcccaggacacaccaggcgccgccccaggccagcccggagcggggagtcgcgggtccaacgcatgctgcttctgctggtgctgctgttgtagctgctcgtgtctcactgttagaaaccaggaagatcagaggcccacaatagcttcccacgaactcagagcagatcttccaacctgggaagaaagccctgctcctactctggaagaagtcaacgcctgggctcagtcatttgacaaattaatggtcactccagcaggaaggaatgcattccgtgaattcctccgaacagaattcagtgaggaaaatatgctcttctggatggcctgtgaggaactgaaaaaggaagctaataaaaacattattgaagagaaagcaaggataatctatgaagactacatttctatactttctcctaaggaggtgagcttagactcccgggtgagagaagtgatcaacagaaacatggtggagccatcccaacacatattcgatgatgctcaacttcagatttacaccctgatgcacagagactcatatcctcgattcatgaactctgctgtctataaggacttgcttcagtccttatcggagaaatctattgaagcataggatttttcaaatatatttattattaataaaataataaaagaattcatgggctacaactagcacagggaatttagaggttgtagcatcttctgctggagtaatactcaggctattctaataacagatgattccttcaacagactgctatatattcaccatgtaaactgcagccacctttagtgatacttttgaaaaaaaaaaataaagggatatggctgttgtagaaagatagcgtatttgcatttacaataacagtagcatgttgtcagtggccaaggctacacagaaggctccctgctgcccggagcaggtacatccaccagagcaaagggaaccacttttattttgcatgagtttggtaactgattactctcccctcaaagaaaagacattcaggtgtttctcaacgacatcttctgtccagcaagctcggtttgaatacgtcacttaccagtgccattgcaggacccaaattcacagttcataaaagatgtgaccactacatgtaaaaatagcattctacttgatcttacagtatgtatgtatgtatgtatggagacatatgtgtgcgtgtggatgtctacatggttaatggaaagcactgtgctctgaagtggatcagtctcaagtgtctggtaacagcagcagtgcttagaaaattcttttgttgaaaagagttactgttattatcagaatttgccaacctaaagaatgaatttttaaattcataacttggtcgtgttcacaacaaaactgtcaaataagcatatttccatttttattactgaaagaaatatgggcattttcattctttaaagaaataaagcacaagaattttaaaaaaaaaaaaaaaaaaaaaaaaaaaaaaaaaaaaaaaaaaaaaaaaaaaaaaaaaaaaaaaaaaaaaaaaaaaaaaaaaaaaaaaaaaaaaaaaaaaaaaaaaaaaaa

SEQ ID NO: 27956 - DNA, 1820 bp, Homo Sapiens
ggctgcagggttccccttggcctgcaaacaggaacacagggtgtttctcagtggctgcgagaatgctgatgaaaaccccaggatgttgtgtcaccgtggtggccagctgatagtgccaatcatcccactttgccctgagcactcctgcaggggtagaagactccagaaccttctctcaggcccatggcccaagcagcccatggaacttcataacctgagctctccatctccctctctctcctcctctgttctccctccctccttctctccctcaccctcctctgctccctctgcctttaccactgtgggggggtcctctggagggccctgccaccccacctcttcctcgctggtgtctgccttcctggcaccaatcctggccctggagtttgtcctgggcctggtggggaacagtttggccctcttcatcttctgcatccacacgcggccctggacctccaacacggtgttcctggtcagcctggtggccgctgacttcctcctgatcagcaacctgcccctccgcgtggactactacctcctccatgagacctggcgctttggggctgctgcctgcaaagtcaacctcttcatgctgtccaccaaccgcacggccagcgttgtcttcctcacagccatcgcactcaaccgctacctgaaggtggtgcagccccaccacgtgctgagccgtgcttccgtgggggcagctgcccgggtggccgggggactctgggtgggcatcctgctcctcaacgggcacctgctcctgagcaccttctccggcccctcctgcctcagctacagggtgggcacgaagccctcggcctcgctccgctggcaccaggcactgtacctgctggagttcttcctgccactggcgctcatcctctttgctattgtgagcattgggctcaccatccggaaccgtggtctgggcgggcaggcaggcccgcagagggccatgcgtgtgctggccatggtggtggccgtctacaccatctgcttcttgcccagcatcatctttggcatggcttccatggtggctttctggctgtccgcctgccgatccctggacctctgcacacagctcttccatggctccctggccttcacctacctcaacagtgtcctggaccccgtgctctactgcttctctagccccaacttcctccaccagagccgggccttgctgggcctcacgcggggccggcagggcccagtgagcgacgagagctcctaccaaccctccaggcagtggcgctaccgggaggcctctaggaaggcggaggccatagggaagctgaaagtgcagggcgaggtctctctggaaaaggaaggctcctcccagggctgagggccagctgcagggctgcagcgctgtgggggtaagggctgccgcgctctggcctggagggacaaggccagcacacggtgcctcaaccaactggacaagggatggcggcagaccaggggccaggccaaagcactggcaggactcaggtgggtggcagggagagaaacccacctaggcctctcagtgtgtccaggatggcattcccagaatgcaggggagagcaggatgccgggtggaggagacaggcaaggtgccgttggcacaccagctcagacaggggcctgcgcagctgcaggggacagacgccaatcactgtcacagcagagtcaccttagaaattggacagctgcatgttctgtgctctccagtttgtcccttccaatattaataaacttcccttttaaatataaaaaaaaaaaaaaaaaaaaaaaaaaaaaaaaaaaaaaaaaaaaaaaaaaaaaaaaag

SEQ ID NO: 27957 - DNA, 1711 bp, Homo Sapiens
gggagggggcgggggtggcccagtgcaaagtgcatcccgaaagccccctgtccggagaccccacggctggcacttcgggccccgtatgacctgggacctcgccgtcccgagacctcctgggtccctccgtagctggaagcctccggcccggagcgcggcagccccctgctccgagccctggaccgggactgcccccccacccgagccaggacttcctccctgcctccctgcacctctgccccaaggctgcccggcggccgggatcgccacctcctgccttctcggctgttcggatgttcgccgggctggggccgtgaggcaccgaggaggatcaggaacaccagggtccggccctgcctggggtatttcttcaatggagaagttggtgagtgtagaggaggctgaaaggaggaagagaagcagcagctgaggagacaggtttgagctggctgaagaagacgcgaaagcaggaagaggtctgcccacctatcagagaagcagaaggcacagtgcctctgaccagcatcgtctgtaaaggttaagaaggcttttttgctctgtagcctggacgtactttgaagccccttcccacgatgctgtacgtgcacaatggttactaggcaatccgtacatcaggagaagggacactcttccataaggctgatccccgtaacctaatgaatcctttgtaaaaagtggactcagctaggatgttacaccatcattgtcgaaggaaccctgagctccaggaagagttgcagattcaggccgcggtggctgctggggatgtccacacagtgcgaaagatgctagaacaaggctattccccgaatggccgagatgcgaatggctggactctgcttcatttctctgcagcaagaggaaaggaaagatgtgttcgggtttttctagaacacggagctgatcctacagttaaagacttaatcggaggcttcacggctcttcactatgcagccatgcatggccgggcccgcattgcacgcttgatgttagaatctgaatacaggagcgacatcattaatgcaaaaagcaatgacggctggactcccctccatgtggctgcccactacggcagggactcatttgtccggctcctcctggagttcaaggctgaggttgacccactcagtgataaaggtaccacaccgcttcagctcgccattatccgagagaggtcaagctgtgtgaaaatcctcctggaccacaatgccaacatcgacattcagaatggtttcctgttgcgatacgccgtgatcaaaagcaatcactcttattgccgaatgttccttcagagaggggcagacacaaacttgggtcgcttagaagacggacagactcctttacacttatctgcccttagggatgatgtgctgtgtgcacggatgttatataattacggagcagacacgaacacacggaactatgaaggacagaccccattggctgtttcaataagtatttctggaagtagtcgaccatgtttggatttcttacaagaagtcacaagtatgtaatataattattactttattgcattttttaaaaatttgcatcttctgaggagcttaatgtgtttttgcaacttaagatgactagatattaatcattcctataaccactgcttggtaagcgatgcctcattcttctgaaataaaaaaaaaaactttgactgtaaaaaaaaaaaaaaaaa

SEQ ID NO: 27958 - DNA, 5297 bp, Homo Sapiens
gtctgcctccgggttgcacgaagagtccgagtcatttctcagaaggttttgataggtgggccttagaggagacgccgccgagcaccgcaagaactggaaaacacacccctctctgtctgcctgggagagccacggaaattggcacttctctgagtgaagctgaggagaaggctgtaaatctgccaaaacagccttgaagtattcttttgtcatgaggaagtgacggctgctggagggaggtgaacaccacaaggagagatggcatctggcctgggccccgcctagcagcagctccacctcctaggccaggccctgtgggatgcgccactagaccaccatggacggatcccacagcgcagccctgaagctgcagcagctgcctcccacaagtagctccagcgccgtaagcgaggcctccttctcctacaaggaaaacctgattggcgccctcttggcgatcttcgggcacctcgtggtcagcattgcacttaacctccagaagtactgccacatccgcctggcaggctccaaggatccccgggcctatttcaagaccaagacatggtggctgggcctgttcctgatgcttctgggcgagctgggtgtgttcgcctcctacgccttcgcgccgctgtcactcatcgtgcccctcagcgcagtttctgtgatagctagtgccatcataggaatcatattcatcaaggaaaagtggaaaccgaaagactttctgaggcgctacgtcttgtcctttgttggctgcggtttggctgtcgtgggtacctacctgctggtgacattcgcacccaacagtcacgagaagatgacaggcgagaatgtcaccaggcacctcgtgagctggcctttccttttgtacatgctggtggagatcattctgttctgcttgctgctctacttctacaaggagaagaacgccaacaacattgtcgtgattcttctcttggtggcgttacttggctccatgacagtggtgacagtcaaggccgtggctgggatgcttgtcttgtccattcaagggaacctgcagcttgactaccccatcttctacgtgatgttcgtgtgcatggtggcaaccgccgtctatcaggctgcgtttttgagtcaagcctcacagatgtacgactcctctttgattgccagtgtgggctacattctgtccacaaccattgctatcacagcaggtgcaatattttacctggacttcatcggggaggacgtgctgcacatctgcatgtttgcactggggtgcctcattgcattcttgggcgtcttcttaatcacgcgtaacaggaagaagcccattccatttgagccctatatttccatggatgccatgccaggtatgcagaacatgcacgataaagggatgactgtccagcctgaacttaaagcttctttttcctatggggctctggaaaacaatgacaacatttctgagatctacgctcctgccaccctgccagtcatgcaagaagagcacggctccagaagtgcctctggggtcccctaccgagtcctagagcacaccaagaaggaatgagactcgcctccctctatttataactgtcccctccaggctgacagtggttcaaccctgaatcctaaaacttgcctttcaagtctcattttgtttctaactgagaactctatggatgatgatctcaaaaagcctttgtctctgggaaaggatgcgttatcttggtcttggaaatttcaaatgatgagggttgggggatggaagcattattccaggtggacgggatagaatccagcctctgcctggattagcccagggggatttggaaagcctttctaccatccttgaggatggtaactgagcttcctctgacagtgaccaaaggatgctgtatccttcagagctaaggcaagacagagagtctgctgttaattctcaaatccagcgaaaggctagacatctctaaatctcgtcttcctccacctcatgtgcatgcctgatctcaccctgacactcctgatgccgcatctgtgatagcactcgtgttgccttcacatggcaggctgggccaaccctgggtggaaggttctgacatttgtgttttcagaaatgtacatctgccttccagtcatctgtgcccttctagggaagatgtgcttgatatgttcaaattggatctactctgaaaacgaaacttggttttggtcctgtgaggactacttgtttgtccacctcctccaccaaaggaattaggaagttaagagaaggggaagaatatggaggataggagagggtgatgatgctttagcccattaaggaagaaaagttccccttactcttacaaaaggtgattgcaccacttaaaaaaggataggtagaaaatctggccattttatgtgttatttttttcctgcataccagtgccccctggaaagatggggatgctcatttcagagacagcctcttcacctgtcctccgtctctccattacagagccacaagccaagcttgagttactggttaatttccttgaagtcaatagagactctctgggtcctcatccccatgcatatatgtctgggagaagcaagcattctccaaaacagggctgttgctttcttcctggccgcatatgtgactgtcttcccctagactgatggtatacttttgagaggggcggataaaggtttgcaaactttaatgggcataaggatcccctagaagcatatgtaaaatgcagattcctgcaccccaactgcagacactgttaagtgggactggagtggggcccacgggtctgcattcttaactggtaccaccagtgattctgatgcgatgcttcaatcccgagatttcacatctggaaagcctaagaatttacaaagatgttctgctaaaacccccagggccccatgcagtcttgctagaaaatttcctccctagggttcctttggaaggttaaatactccccataggatctgtggcatttctccatccaatgaatactacttagagctacactcaccacttccctagacagcctttaataggcatgataacagtgttaatagaccagtgtgatagatcacttatctttatggattgtgcttaatactgatttagtatcttgactccaaaaactgacatctgttgtctgtgataaccacttctgtattgcgtcttaaccacttctgtattgtgtggtcttaactgcctaaggcggcaatgggcagtgggcccctttcccttaggatgggtatcaattcaacaatatttataaggcatttactgtgtgctaagcatttggaagacccaggctacaaaataagacatagttcctgccctccaggccagcagagggaggcacaaatacccaggaatctctgatgggtgtgaagtgcggtcgtgggccacagaaaatgaccgtcatggagaccctgctaaaggtcggaccctgagcccaaaggggtattcagaagtggagatgattttggccccactcatagatgggtggcaaatctaagatttgtataaagcatataaaatagggtgatcacccccgaggcagaggggccagcatttgcaaaggcacagagctaagaggagctgggcaaagaaaggaaacccagggaaggtggtgggagatgagtctcaaagctaagtagtggaagctgggcacagtggctcatgcctgcaatcccagcactttgggaggccaaggctggaggatcacttgagcccaggagttttatatcagcctgggcaacatagcaagacctcatctctgctaaaaattaaaaataaataaattagctgggtgtggtggtgcatgcctgtgatcctagctactcaggaggctgaggtgggaggatcgctagagcccagagaaccaaggctacagtgagccatgatcatgctactgcactccagcctgggtgacaatgagaccatggctcaaaaaaaaaaaaaaaaaaaagataagcagtggaggccgaatcatggagggtcttgaatacctggctaaggagtttaaagtgtatccaagaggacgtgggagccactgatggttcatgaggaagagaagggcaggaccagcactgattgaaaaggagggcttgttcagtgtggaggaagaatcagaagggggaataagttaccttctccgagcctgcaagaacaaaaaacaaaaagcagaaattaaaatcaggtttcactgctatttatatatttctcctttcccaaatgatttttctaaagctgggagtggaggcaggagggagaaacagaaggtgagcagggaggctatttagatgtgtcaaacccgggtgatcattaataatttgggcatatatatgctcccaaacttactctgcccccttccttccctttttttttttttttttttggtatgggccttttaggcttgggccagccagctttcttgagatgagtgaataaaagcgtattgtaatttcatgtctgcttcagatcatggggacagtgccacccaggaactgctgctgaggcctgggaagctcccttgccttcgggtttggagcagtggcatcatcccaccaacctgagtcatgaaagggctgagcagaaagttaaatggtagtttcctgactggaagccacacgtaggtcacttgagtagtcaggaagcacagtgggtgtggagccatcatctgtcttgggctggttcctcccaatctttgtccagtggtataaatggactgtctgctgatggccatacgcagcactggctgttaagatggggaaggggtacatcaggattccactcatagccctggttcgttattgttactcatggctctgacgtccccaagccctcttgaatgttgcaagcaatgttaaatatcacacctcggtctccttttgagcagcccaggtacctaaagcaaggtcaccaaacttgggtttaaacttcagttgccatcacagcagggttcaggttatgcagtttttgcagtgtggagttgaacgctgggtaaagaagggagagctgactctccattgcttttctagtggaaaccagccagtttgacggcacggtgcggatacaggactccatcaggctagtgttggggaaccagcccggcagccttccatgtgaattccaaagctgtttcaacactggctgataggcagacaaaaggttacttgtgtgtttctctgagaagcggtgtaaaggaagtcaccttagaatatattctgtgcggatgcttatattttgttaacttcacgacttatggcatgtcttatttaaaaaaaaaaaaaaa

SEQ ID NO: 27959 - DNA, 4531 bp, Homo Sapiens
gtagccggcttggcgtgaccctcgcctgatccagttgttagagttggaagcttggcagttggcctcccttcttcccatggaggacgggggcttaacagcctttgaagaggaccagagatgcctttcccagagcctccccttgccagtgtcagcagagggcccagctgcacagaccactgctgagcccagcaggtcgttttcctcagcccacagacacctgagcagaaggaatgggctttccagactctgccagagcaggacagcgctctctgaagacagatggagctcctattgtctatcatcactggctgcccagaatatttgtacaagtaaactgcactgccctgctgcccctgagcacacggacccgtccgaaccgcggggcagtgtgtcctgctgctccctgctgcggggactgtcctcagggtggtcctcacctctgcttccggcccctgtgtgcaaccctaacaaggccatcttcacggtggatgccaagaccacagagatcctggttgctaacgacaaagcttgcgggctcctggggtacagcagccaggacctgattggccagaagctcacgcagttctttctgaggtcagattctgatgtggtggaggccctcagcgaggagcacatggaggccgacggccacgctgcggtggtgtttggcacggtggtggacatcatcagccgtagtggggagaagattccagtgtctgtgtggatgaagaggatgcggcaggagcgccgcctatgctgcgtggtggtcctggagcccgtggagagggtctcgacctgggtcgctttccagagcgatggcaccgtcacgtcatgtgacagtctctttgctcatcttcacgggtacgtgtctggggaggacgtggctgggcagcatatcacagacctgatcccttctgtgcagctccctccttctggccagcacatcccaaagaatctcaagattcagaggtctgttggaagagccagggacggtaccaccttccctctgagcttaaagctgaaatcccaacccagcagcgaggaggcgaccaccggtgaggcggcccctgtgagcggctaccgggcatctgtctgggtgttctgcaccatcagtggcctcatcaccctcctgccggatgggaccatccacggcatcaaccacagcttcgcgctgacactgtttggttacggaaagacggagctcctgggcaagaatatcactttcctgattcctggtttctacagctacatggaccttgcgtacaacagctcattacagctcccagacctggccagctgcctggacgtcggcaatgagagtgggtgtggggagagaaccttggacccgtggcagggccaggacccagctgaggggggccaggatccaaggattaatgtcgtgcttgctggtggccacgttgtgccccgagatgagatccggaagctgatggaaagccaagacatcttcaccgggactcagactgagctgattgctggaggccagctcctttcctgcctctcacctcagcctgctccaggggtggacaatgtcccagaaggaagcctgccagtgcacggtgaacaggcgctgcccaaggaccagcaaatcactgccttggggagagaggaacctgtggcaatagagagccccggacaggatcttctgggagaaagcaggtctgaaccagtggatgtgaagccatttgcttcctgcgaagattctgaagctccagtcccagctgaggatgggggcagtgatgctggcatgtgtggcctgtgtcagaaggcccagctagagcggatgggagtcagtggtcccagcggttcagacctttgggctggggctgccgtggccaagccccaggccaagggtcagctggcggggggcagcctcctgatgcactgcccttgctatgggagtgaatggggcttgtggtggcgaagccaggacttggcccccagcccctctgggatggcaggcctctcgtttgggacacctactctagatgagccgtggctgggagtggaaaacgaccgagaagagctgcagacctgcttgattaaggagcagctgtcccagttgagccttgcaggagccctggatgtcccccacgccgaactcgttccgacagagtgccaggctgtcaccgctcctgtgtcgtcctgcgatctgggaggcagagacctgtgcggtggctgcacgggcagctcctcagcctgctatgccttggccacggacctccctgggggcctggaagcagtggaggcccaggaggttgatgtgaattcgttttcctggaacctcaaggaactctttttcagtgaccagacagaccaaacgtcatcaaattgttcctgtgctacgtctgaactcagagagacaccctcttccttggcagtgggctccgatccagatgtaggcagtctccaggaacaggggtcgtgtgtcctggatgacagggagctgttactactgaccggcacctgtgttgaccttggccaaggccgacggttccgggagagctgtgtgggacatgatccaacagaaccgcttgaggtttgtttggtgtcctctgagcattatgcagcaagcgacagagaaagcccaggacacgttccttccacgttggatgctggccctgaggacacgtgcccatcagcagaggagccaaggctgaacgtccaggtcacctccacgcccgtgatcgtgatgcgcggggctgctggcctgcagcgggagatccaggagggtgcctactccgggagctgctaccatcgagatggcttacggctgagtatacagtttgaggtgaggcgggtggagctccagggccccacacctctgttctgctgctggctggtgaaagacctcctccacagccaacgcgactcagccgccaggacccgcctgttccttgccagcctgcccggctccacccactctaccgctgctgagctcaccggacccagcctggtggaagtgctcagagccagaccctggtttgaggagccccccaaggctgtggaactggaggggttggcggcctgtgagggcgagtactcccaaaagtacagtaccatgagcccgctgggcagtggggccttcggcttcgtgtggactgctgtggacaaggaaaaaaacaaggaggtggtggtgaagtttattaagaaggagaaggtcttggaggattgttggattgaggatcccaaacttgggaaagttactttagagatcgcaattctatccagggtggagcacgccaatatcatcaaggtattggatatatttgaaaaccaagggttcttccagcttgtgatggagaagcacggctccggcctagacctcttcgctttcatcgaccgccaccccaggctggatgagcccctggcgagctacatcttccgacaactagtgtcagcagtgggatacctgcgcttgaaggacatcatccaccgtgacatcaaggatgagaacatcgtgatcgccgaggacttcacaatcaagctgatagactttggctcggccgcctacttggaaaggggaaaattattttatactttttgtgggaccatcgagtactgtgcaccggaagttctcatggggaatccctacagagggccggagctggagatgtggtctctgggagtcactctgtacacgctggtctttgaggagaaccccttctgtgagctggaggagaccgtggaggctgccatacacccgccatacctggtgtccaaagaactcatgagccttgtgtctgggctgctgcagccagtccctgagagacgcaccaccttggagaagctggtgacagacccgtgggtaacacagcctgtgaatcttgctgactatacatgggaagaggtgtttcgagtaaacaagccagaaagtggagttctgtccgctgcgagcctggagatggggaacaggagcctgagtgatgtggcccaggctcaggagctttgtgggggccccgttccaggcgaggctcctaatggccaaggctgtttgcatcccggggatccccgtctgctgaccagctaaacaccaatttcttcctgcttttctccacttggtttggaaaatcacacagttttcaggctccatctgtttggagaaaatacattctgaagcatccccaattcaccttctaaaaactcatgtgcaggtttgataaacaccagaacagaagacagtgatgctgtattattttagatttattacatagatttggaattcacttttttcatgacctagaaaaaaacattccagtgttcaactgttttatattattaaagggcttttaatttgtgaacttctgaaggcatgagtgttttctctttctacttttgtatatgtgcatgttttgtttcctctgacttggtatatgctcatctgagtgacggatatgtgaaatttgtagaactggttagtcaaatggccagactatttcattaatttatttcctcaaatgcttttcaaattaaagcacctttgttagtaaacagttaaaaaaaaaaaaaaaaa

SEQ ID NO: 27960 - DNA, 2507 bp, Homo Sapiens
gaaagcacccgggcgcagccggagccggtgccgcagctgcgatggccgtggccgtggggagaccgtctaatgaagagcttcgaaacttgtctttgtctggccatgtgggatttgacagcctccctgaccagctggtcaacaagtctacttctcaaggattctgtttcaacatcctttgtgttggtgagacaggcattggcaaatccacgttaatggacactttgttcaacaccaaatttgaaagtgacccagctactcacaatgaaccaggtgttcggttaaaagccagaagttatgagcttcaggaaagcaatgtacggctgaagttaaccattgttgacaccgtgggatttggagaccagataaataaagatgacagctataagccgatagtagaatatattgatgcccagttcgaggcctacctgcaagaggaattgaagattaaacgttctctcttcaactaccatgacacgaggatccatgcctgcctctactttattgcccctactggacattcactaaagtccctggatctggtcaccatgaaaaagctggacagtaaggtgaacatcattccaataattgcaaaagctgacaccattgccaagaatgaactgcacaaattcaagagtaagatcatgagtgaactggtcagcaatggggtccagatatatcagtttcccactgatgaagaaacggtggcagagattaacgcaacaatgagtgtccatctcccatttgcagtggttggcagcaccgaagaggtgaagattggcaacaagatggcaaaggccaggcagtacccctggggtgtggtgcaggttgagaatgaaaatcattgcgattttgtgaaacttcgagagatgctgatccgcgtgaacatggaggacttgcgagagcagactcacacccgccactatgaattgtaccgacgctgtaagcttgaagagatggggttcaaggacactgaccctgacagcaaacccttcagtcttcaggagacatatgaagcaaaaaggaatgaattcctgggagaactgcagaagaaagaagaagaaatgagacaaatgtttgttatgagagtgaaggagaaagaagctgaacttaaggaggcagagaaagagcttcacgagaagtttgaccttctaaagcggacacaccaagaagaaaagaagaaagtggaagacaagaagaaggagcttgaggaggaggtgaacaacttccagaagaagaaagcagcggctcagttactacagtcccaggcccagcaatctggggcccagcaaaccaagaaagacaaggataagaaaaatgcaagcttcacataaagcctggcaagccaaggatgttcccgcattcacctgcttttgcagtaatatcgtatctctgccatgtgtgttctttagttttattttattttattttatttttttacccttcctcaaacaccagtaactattattaactcgttttgctgaatgttgttgggtggtagaaaatgatagaacaagggaataaccgcgaatgctctgtgcagctggactctgtttccggaaagtaaatgatttgctttttatgcctgttctgaatggcagcacgaagcaggcctgttacttgtatgtcgctttggacagaggaaagtggggtaaaatgctacctgtacgtctgacatgaaaacttctcaccgcctcagcagctgaactaaaaacctgaatagccatgacaagagtttgcattttcttgatgattcatctccatgagtgcacaatccctgaactcactgtcttttctccacacttgtcctaagccaaggtagatttgtacgtagacagactggtgagcaagcattatattttatttttacccttgcatgacattttcattttaatcaataacattatttggcctgagcttgtgggtctgttcagactgtctcctctcatggtttgaaactgcatctgaatgcctgccttcaatcctggccaagttggagtagactggtatgagaaaactatgattagttcacatttactggtgcatccttgatcctctcacagatagaggtcttaaaggttggatcatgtaacattgcttagtagaagaatcttcttctaaggatgatgggctttctacagcctgcttaccactaacagtaaggaatctttcataaacacacctcagtttgttcccagtgggcttagagggaggacctgatgactgattccaggatacttgtacttctaataacatttttcatgaatcatgagaaaatttccacagatacttcccttagaaaatttgctataaactctgtatcattggtagcacaaatttgagcgaggccttgtcaattttaaggtggaaataggaaggaccacaacatgacccgtaagtcaagaaggtagacatttcatatccagcttccttgcttagtctcctttcagtatttggcaataaaagaaagaagaaatagaaaaaaaaaaaaaaaaaaaaaaaaaaaaaaa

SEQ ID NO: 27961 - DNA, 1726 bp, Homo Sapiens
caaaattcagaagacgagtgatctgaaacccagccagactggaccaaaggaaaagcctttccaaaagcctaggtccttggattcctcaagaatctttgatggtaaagccaaagagccatatgctgaacaacctaatgataaaatggaagcagaatccatttacataaatgaccctactgtcaaacccatcaatgatgacttcagaggtcacctcttcagtcaccctcaacagagcatgttgcaaaatgatggtaaatgctgtccctttatggaaagcatgttgagatatgaagtgtatggtggagaaaatgaggtaattcctgaagtcttgaggaaaagtcattcccactttgacaaattaggggagaccaaacagactccgcatagtctgccatcacgaggtgcctccttttcagaccgaacaccctctgcttgtagattagtggataacacaatacaccagtttcaaaatcttggccttttggattacccagttggcgtgaaccctttaagacaagctgcaagacaagacaaagactcagaagaattattgagaaaaggatttgtccaggatgcagagactacaagcctagaaaatgaacagctttctaacgatgaccaggccttgtatcagaatgaagtggaagatgatgatggtgcctgtagttcattatatctagaggaggatgacatttctgagaatgacgacttacgtcaaatgctgcctggccacagtcagtattccttcacaggtggaagccagggaaatcatttaggaaaacaaaaagtgattgagagatctctgaccgagtacaacagcacaatggagagggttgagtctcaggtgcttaaaagaaatgaatgctacaaacccactgggctgcatgctaccccaggtgaaagccaagaacctaacctctctgctgaaagttgtggcctaaattcaggggcccagtttggttttaactacgaagaagaacccagtgttgctaaatgtgtacaggcctcagcacctgctgatgaaagaatctttgattactatagcgcaagaaaagccagttttgaagctgaagtcatacaagacactattggtgacacaggaaagaagccagctagctggagtcagagtcctcagaatcaggaaatgagaaaacatttcccacaaaagttccaacttttcaacacttcacatatgccagtgttggctcaggatgtccaatatgaacacagtcacttggaagggacagaaaatcacagcatggcaggagatagtggaatagattctccacggacacagagtctgggatctaataattcagtcattttggatggactaaaaagaagacagaattttctgcaaaatgtcgaaggcacaaagagcagtcaaccactcacatctaattccttactaccgctaactccagtcataaacgtttaattttcttttggaaacctacttttttctttataaaaaggtagagcattattacagaatctttcaatcatgtaagaattgagtatataagaattgtctaaaggcaagcatatctatactattaaccacattacacattttgttctaattactggctttttttcctcttttggtgtcttaaggctttttgaagcttattttactgtgagtttattgggagtatatagattattttcgattaaaaagtggaattattggtcccctaaaaaaaaaaaaaaaaaaaaaaaaaaa

SEQ ID NO: 27962 - DNA, 3610 bp, Homo Sapiens
ggagaattccaccctctttcattctggggagaagaagttaaaattagggccagccctgcgggactgacatgccagatgcagggaagctgtccccagaaataagcgagttcccaccgcggctgggcggggcgggagcctcgggtcccaacccagcggagggactcctggaaggcctgccccttccaagtgtctgcaagggctctggtcccaagctttaaaatcctgagcgaaggcactgcgggccgacctctcctctcccagccagtcgtggctggcctttcaaagtgtgcagttgtctcctccctgtccagccccatcgtcgcccaggaccagctgggccgcggtctgacctgaggctgctgctcagcgccggggcgctggcgctctccattcgagcaccttccagcataccgctcggctccgggagccgctctgcaaagttgggcagctcagagcgcaagctttgcctctcgacttctccctccttgggtccccggcgcccccgcctcccacgatccctttcactaggagcagccagtcccagcgggctggcaacttgcaccccttcctagtcatcctccctgaaacgcgaccatgctgttaaggggcgtcctcctggcgttgcaagccctgcagctcgccggtgccctcgacctgcccgctgggtcctgtgcctttgaagagagcacttgcggctttgactccgtgttggcctctctgccgtggattttaaatgaggaaggccattacatttatgtggatacctcctttggcaagcagggggagaaagctgtgctgctaagtcctgacttacaggctgaggaatggagctgcctccgtttggtctaccagataaccacatcttcggagtctctgtcagatcccagccagctgaacctctacatgagatttgaagatgaaagctttgatcgcttgctttggtcagctaaggaaccttcagacagctggctcatagccagcttggatttgcaaaacagttccaagaaattcaagattttaatagaaggtgtactaggacagggaaacacagccagcatcgcactatttgaaatcaagatgacaaccggctactgtattgaatgtgactttgaagaaaatcatctctgtggctttgtgaaccgctggaatcccaatgtgaactggtttgttggaggaggaagtattcggaatgtccactccattctcccacaggatcacaccttcaagagtgaactgggccactacatgtacgtggactcagtttatgtgaagcacttccaggaggtggcacagctcatctccccgttgaccacggcccccatggctggctgcctgtcattttattaccagatccagcaggggaatgacaatgtcttttccctttacactcgggatgtggctggcctttacgaggaaatctggaaagcagacaggccagggaatgctgcctggaaccttgcggaggtcgagttcaatgctccttaccccatggaggttatttttgaagttgctttcaatggtcccaagggaggttatgttgccctggatgatatttcattctctcctgttcactgccagaatcagacagaacttctgttcagtgccgtggaagccagctgcaattttgagcaagatctctgcaacttttaccaagataaagaaggtccaggttggacccgagtgaaagtaaaaccaaacatgtatcgggctggagaccacactacaggcttagggtattacctgctagccaacacaaagttcacatctcagcctggctacattggaaggctctatgggccctccctaccaggaaacttgcagtattgtctgcgttttcattatgccatctatggatttttaaaaatgagtgacaccctagcagtttacatctttgaagagaaccatgtggttcaagagaagatctggtctgtgttggagtccccaaggggtgtttggatgcaagctgaaatcacctttaagaagcccatgcctaccaaggtggttttcatgagcctatgcaaaagtttctgggactgtgggcttgtagccctggatgacattacaatacaattgggaagctgctcatcttcagagaaacttccacctccacctggagagtgtactttcgagcaagatgaatgtacatttactcaggagaaaagaaaccggagcagctggcacaggaggaggggagaaactcccacttcctacacaggaccaaagggagatcacactactggggtaggctactacatgtacattgaggcctcccatatggtgtatggacaaaaagcacgcctcttgtccaggcctctgcgaggagtctctggaaaacactgcttgacctttttctaccacatgtatggagggggcactggcctgctgagtgtttatctgaaaaaggaagaagacagtgaagagtccctcttatggaggagaagaggtgaacagagcatttcctggctacgagcactgattgaatacagctgtgagaggcaacaccagataatttttgaagccattcgaggagtatcaataagaagtgatattgccattgatgatgttaaatttcaggcaggaccctgtggagaaatggaagatacaactcaacaatcatcaggatattctgaggacttaaatgaaattgagtattaagaaatgatctgcattggatttactagacgaaaaccatacctctcttcaatcaaaatgaaaacaaagcaaatgaatactggacagtcttaacaattttataagttataaaatgactttagagcaccctccttcattacttttgcaaaaacatactgactcagggctctttttttctttttgcatatgacaactgttactagaaatacaggctactggttttgcatagatcattcatcttaattttggtaccagttaaaaatacaaatgtactatattgtagtcattttaaagtacacaaagggcacaatcaaaatgagatgcactcatttaaatctgcattcagtgaatgtattgggagaaaaataggtcttgcaggtttccttttgaattttaagtatcataaatattttttaagtaaataatacggggtgtcagtaatatctgcagaatgaatgcagtctttcatgctaatgagttagtctggaaaaataaagtcttattttctatgttttattcatagaaatggagtattaatttttaatattttcaccatatgtgataacaaaggatctttcatgaatgtccaagggtaagtcagtattaattaatgctgtattacaaggcaatgctaccttctttattccccctttgaactacctttgaagtcactatgagcacatggatagaaatttaacttttttttgtaaagcaagcttaaaatgtttatgtatacatacccagcaacttttataaatgtgttaaacaattttactgatttttataataaatattttggtaagattttgaataatatgaattcaggcagatatactaaactgcttttatttacttgtttagaaaattgtatatatatgtttgtgtatcctaacagctgctatgaaattataaaattacctaataaaaataatttgaaaatcttaaaaaaaaaaaaaaa

SEQ ID NO: 27963 - DNA, 1294 bp, Homo Sapiens
cattttaaaatccagtggtagatgtagcttagcgacggtagttttttgttttggctatactaagacttggaaattattctctccagtgtcagcgaatccagaagggtatcagattaaacaccgaattcagccactggacttttaaaagtacttaagatggtttatctcgggttttttcttcagttaacaaaatcataaatatggtgccttataacatgaaaggaaaattagttgtgtatttcacgacgaaagcgacggaccaaaagaaatttcctgccccaagaagcatgggatccaggaaggggcgcgtagatgcttaacggtctcttcggaaatcctgcaaatagaaagataattctagatccggaatacctgtatctggtggaaaccatggatttctacaagctcgaattattcctcattgtatagcctgctttgtaaactagtttacaatttgcaggctgatcttaagatttttttatatctaattgctgctgccttcattttaggttcagcagttacttttaactaccttaatttattgccagaaggtatgagcctaacattctgatgagtccagaaaactacgttttgtcagtagcaatacactaggaagtaaaatatatttagaatttaaacattgtgtgccagtggtcctcgcgcttgactgcacatcagttacttgaagagccacacctcagatcaatgcagtcagaacctgggaagtaggtcccagacatcaggacctttttaaagctccccaagtgattctacgttccccaagtttgaggaccacttttctgtgcattggcttgcacaatttgaaaataatgcttttcctgagctggatcccagtgttgccttaacagggtgtctgtcgtgccgcagtagagcactgctgcttcctccaaccccaaaatttatgttcctaagtaagtcaggtccctaagccccgtcccaagaagtgacacaagtggccaacatccacactgtaggcttgcaggctacccgccctgagatttggtaaagaacactgccttgttccccatcagtaaacaaggttacctacctcaggaggctgcttgtgagagagcaaatgcagtatcttcagaatgatttatttttttaattaattgtaaagacttgtgccattggctgctctttctagtcccctaaatttctgttctagttttaaatttctctagaacttgcaatagttgggggttttataatgatgttttacaatgtttatttcttaaataaaaacttaaaaattcaaaaaaaaaaaaaaaaa

SEQ ID NO: 27964 - DNA, 1446 bp, Homo Sapiens
gtcaatgtttcctgtgaagaagtagatggctgccctgtcattctagtttgtggatcccaggatgttggaaagtcaacatttaatagatacctgattaaccatttgttaaatagtcttccctgcgttgactatttggaatgtgatctgggacagacagaatttacccctcctggttgcatttctttgcttaatattacagaaccagttctgggaccacctttcactcacctgaggactccacagaagatggtatattatgggaaaccttcttgtaaaaacaactatgagaattatattgacatagtgaaatatgtgttcagcgcttacaagagagagtcccctctcatcgtcaacactatgggatgggtttcagaccaggggctcctgcttctcattgatctgatccgattgctgtctcccagccacgtggttcagttccgctctgaccacagtaaatatatgccagaccttaccccgcagtatgtagatgacatggatggcttgtacacaaaaagcaagaccaagatgagaaatcgacgtttcagactcgcagcatttgcagatgctttggaatttgctgatgaagaaaaagagagtccagttgagttcactggacataaactgataggtgtttatacagactttgcattcagaataactccaagaaatagagagtcacataacaaaattcttcgagatctgtccatcttgagttaccttagccagctgcagcccccgatgcccaaaccactttctcctttacatagcctgacaccctatcaggtccctttcaatgcagtcgcactccggattacccactctgatgtcgcccctacccatatactatatgctgtaaacgccagctgggttggtctttgcaagatccaggatgacgtcagaggatacacgaatgggcccatcctgcttgcccagactccaatctgtgactgcttgggctttggcatctgtagaggcattgacatggagaagcggctgtaccacatcctcacccctgtgcccccggaagagctaaggaccgtgaattgtctgctcgttggagctattgccattccacattgtgtccttaagtgccagcgtgggatcgaagggacagtaccttatgtcacaacggattacaattttaaacttcctggagcatcagagaaaattggagcaagagaacctgaggaggcacataaagagaaaccataccgaagacctaagttctgtcgaaaaatgaagtgatgctcgcgtttttaataagggaagaaactttcctaccagaaagctttgtctcaagcctgaccacaagagacatgatggagtttcatggccatgaatggtgcccttattaacaacagtgttttttgtgtaattcgtgaatgtcatatagtagtcttaagtttctcttttaaagctgcatgagctagaaaaaaaaaaaaaaaa

SEQ ID NO: 27965 - DNA, 2556 bp, Homo Sapiens
ggcaaccgctactcccgggggtgctttttctgcagggacgaagtgccacctatgctagtggcgggtctggaagcctagaggggaaccaggctgcagagccgggccaagggattagcggcgggcggcgggcatggcctggactgcgcgggaccgcggggccctggggctgctgctgttggggctctgcttgtgcgcggctcaaagaggtcccccgggtgagcagggtcctcccgggcctccgggcccccctggagttccaggcatcgatggcatcgacggtgaccgaggtcctaagggccccccgggccccccgggtcctgcaggtgaaccgggaaagccaggagctccaggcaagcctggcacacctggcgctgatggattaacaggacctgatggatcccctggctccattgggtcaaagggacaaaaaggagaacctggtgtgcctggatcgcgtggatttccaggccgtggtattcctggaccccctggtcctcctgggacagcaggactccctggagagcttggccgtgtaggacctgttggtgaccctgggagaagaggaccacctggcccccctggccccccaggacccagaggaacaattggctttcatgatggagatccattgtgtcccaatgcctgtccaccaggtcgctcaggatatccaggcctaccaggcatgaggggtcataaaggggctaaaggagaaattggtgaaccaggaagacaaggacacaagggtgaagaaggtgaccagggagaactcggagaagttggagctcaaggacctccaggagcccagggtttgcgaggcatcaccggcatagttggggacaaaggggaaaaaggtgctcggggcttagatggtgaacctgggcctcagggtcttcctggtgcacctggtgatcaaggacagcgaggacctccaggagaagcaggtcccaaaggagatagaggggctgaaggtgctagaggaattcctggtctccctgggcccaaaggagacacgggtttgccaggtgtggatggccgtgatgggatccctggaatgcctggaacaaagggtgaaccaggaaaacctgggcctcctggtgatgcaggattgcaggggttaccaggtgtaccgggaattcctggtgcaaagggtgttgctggtgaaaagggtagcacaggtgctccagggaagcctggtcagatgggaaattcaggcaaaccgggccaacaggggcctccaggagaggtgggaccccgaggaccccaggggcttcctggcagtagaggagaattaggaccagtgggatccccaggcctaccaggtaaactgggttctctgggtagccctggcctccctggcttgcctgggccccctggacttcctggaatgaaaggtgacaggggtgtagtcggtgaaccgggtccaaagggtgaacagggtgcctctggtgaagaaggtgaagcaggagaaaggggggaacttggagatataggattacctggcccaaagggatctgcaggtaatcctggggaacctggcttgagagggcctgagggaagtcgggggcttcctggagtggaaggaccaagaggaccacctggaccccggggtgtgcagggagaacagggtgccaccggcctgcctggtgtccagggccctccgggtagagcaccgacagatcagcacattaagcaggtttgcatgagagtcatacaagaacattttgctgagatggctgccagtcttaagcgtccagactcaggtgccactgggcttcctggaaggcctggccctcctggtccccccggccctcctggagagaatggtttcccaggccagatgggaattcgtggccttccgggcattaaggggccccctggtgctcttggtttgaggggacctaaaggtgacttgggagaaaagggggagcgtggccctccaggaagaggtcccaacggtttgcctggagctataggtctcccaggtgacccaggccctgccagctatggcagaaatggccgagacggtgagcgaggccccccaggggtggcaggaattcctggagtgcctggacccccgggacctcctgggcttcccggtttctgtgagccagcctcctgcaccatgcaggctggtcagcgagcatttaacaaagggcctgacccttgaaaggcttactgctgcatggctgtctgcatgaaccacgcctggtgaaggagcctgggtgagaaacaccatccaaagctggggcaaagatgattaccttcagcatgattacaatgtattaccttcagtatgattacagaagtcctacttgacaatcacatatagaagaacggtgctattcagtaagttctctttcctttcccttggagggaagacagcagagtcatcagttaaaaaaaaaaaagaaaaccaaacacctcccttgaacaaatttatactcctgttcccaggatcttgagctttagtgtgctatacctatgtgtcttatcgtgggccactgtgccaataaacaaaaacaactgtttggtttacctcaaaaaaaaaaaaaaaaa

SEQ ID NO: 27966 - DNA, 1797 bp, Homo Sapiens
tgtttctggagcctccagggatctaggggagcctgggctgcgtgcatgtcgataagcagagctgttcttggggagaaggagggaggtctcgggagtgtagcaccatgccaaccagccctgcgcgaagacagagtgagccacgcccggatggcagggcatgtttctgttttggtgtctcactttcctcccagcgtgacttatttggggattcctcagggcctactggaatgtgactgcccactgcccagctgcctcgggtacaagtcctggccctatgtcccagctgtcaggggctcagggaatcctacccagccacctgtcctgggatggagtgtcagcatccaccccttggttgtcatcgaggccgccctcccagtcctgggtgaagatatttgggccaccagggctcccttggccccttcacgtaggaaatagacacgtgctttttaatgcaggacactttgagtgttacaaaatctgtagacctggcagtagggtcatgatgttgggaagggtgtagtgccctaggttggtgacagaagggacagacacttgtgcacaggtgtctttggtgatggggtttttttttttataacttagtaaaaaaaaaaaaatgtatgtggaattctgtctcttggtaaagctcaaagccaggctagcctgaggtggcgcagggctctccttcctgtcccttcgatctccttgagaattaagagctggcagctgctgatggtgtttcccaacccccctcacttcccaagacaacccccagcttcaggtcctcatggggaggggagggcacgttcttgatacatgggaacttcgctcaggagggcctccccttcccctctccctcagagttttcactgccgtctcgtctttagaaagctgtttgaattccccccgcccccagtttggaccgtgtagatataactggatatacggatttttctctttgtgcaggcttcttatgccgttggtatacagggcaggaaagagaggaataaagggagagagcagtgtggaaaccacggtggttttgctttgttcttactaggttttggtgccaccttccctgcctgcgcttgtgccccctctcctccttggcactggcggcctccttgcctcccttccaccagtgctgccatcccgtgcctgtcgtgttggttcttcacacgtgctctgttctcggggttgttccattcatgccttcttggagggtgagggtggcttgggaaccgacccagtgatcatgcctactttcttctttgtatctccctccttcccagcccacccgggcagcagactctgatggaaggaaggtgccgtaggtgggcttttagaaactaacgggactggttttcaaagcagttatcttgggaaactgtttattccagcgatgtgacttttttcagaatatttcttggaatcatattcagagtctggggctgtgtgttgagcagccttaaggatgctagacactcatttagtgcccagggagtccagcgaatgacgtctgtggccaagcgaggtctcaggtgcaaagcaaaaggaccatttaaagtaaaatagcttggattcaatcatgtgacttttaaattggctcagaaagcaattttgtaatttcagagagtgttttgagccatggccacgttgtcattgtgagtctatagcttgactccttggagaacaatattcatttggttgtggagactgatttgctgggagaaatctgtcctgttactttctggtcatcccaggttctgacttttaccaggggcaaaaaaaaaaaaaaaa

SEQ ID NO: 27967 - DNA, 2849 bp, Homo Sapiens
aaggaccatagcttttattagattctcaaaggttcagaatggggaatgtgttaaacaaaccgaaaacctgtttcagctttaaaatcctccaaaactttaaagacttttcttttttctgagaaaggctggtaaatcactgagtcatcattcagaacatacagcctcgaagggcagagctcacacccatatatgacgttaagagctcaacaaatgtttgttgagtgactgagtgaccccaggggcagactccagatcatcagacactgatacagagagcgatgctatctcctcaactctccctcttctcctaaaagctgagtctatatagggatgacaggctcaggctgagcagtcgacttctctgggttttgctgtgtaagaataggtccctcaacatgaagatgtgtctgcgtctgagccagatgctgcctgggtcggttgcctggcctccgtctggtctccctccctcctactagggtggtcaagctgtgagatctcttccagcctccaaatccagctttcccattttactgatgagaaaatcaaggccacattgcagctgggtggggagtggagcgtgacaggcacgggagaggacagcgattgttgactctagttcctgatgtttaatcagaaaaaccacttttcctgtagagcacatttcctaaaaggctgctgctgtgtagggaggtgtggccttttcctggtgcagtgtgaaggagggaagtgacgggcagtcgtgaactgtctgggacagatagcacaagtcagagtttgagcaaaactagggtgttaccggcgctatgttgaaattgtctggaggcgggctttcccagcgagtctccattcagcatctggaaaaagtgtaaccagaatggaggtgtctgactctcctgtgctctctcagcgccgagctctagctgcaggctgcctgggtggccttctcacaccctcccgtgcaggagactgcatttctctttcccacagcccagcagatagctcattggcttagcaatgggcacttaacagaatccagttgttgcagccagaattaaatgcaccagtctggcttaaaccaactggaactcatccctggggtgaaggtggctgggaattagacaagagtgtgtgttagccaaaaggcacatgcatgctgtcagcaggagaatgaggagcactggttctgggcaggcagtggcaggggctccctcaggcccctgattcccagcccacagctctttctactctgcagacagagttccttggagactggccctgcattcaggcagggagcagaggggtccctgcctgcagcacccagagctgaacctgaagctacaaagatgggctgatgaggtggcccatgaggtgtcagcaacatcccaaccccctgggtctccccagtgagtcagggcactgatttgctatagctggagctacatgcacctctcctcccctcagccaccttttaggggagaaaggagggcagatttgtaacctctggttctctgcagggatcctgggctggaagaaagttcataaatggatgaatgccttttaaaactccagcttttccaagcatcattcaccaaagcatttggttaggcttagagagaaaagctggatatgagaaaatagaatgtaaaataggagggaaaaaaaaaagaaggtggagagggcagttaagatctgggtgattctttagggaaacggctggttgagaggctttgatggaatcccattctctgctgtggccagaaggtggtgctagaggccagtcccacttggatgtgaccctggcctctgccaggattcaaaccacaaagaacatttggaactgggatgtttgctttgaagcagcccgaaaacaagtgaaaggaaaccaagataactctctctccctccgctggcaaggatcaaaaataccttgtgcagggaagcccgagcctcgaggggccactgcccagctaaagatgactggacaccagccatgcaccatcaggaaccagcacctgtcctcacccctgagaagagccccgggggtatcattatatccatcgcagacatctggtttgcagcaaatgtggctacacgccatcaggattatcctgccctgtggactgggctagctagttttgagatagagtcaacctccccatttttgtttgtcatgaaaacaccagctcctgcacccctggggtgctacctgacacctgtgcaaagaaaaggaggaaaacttagaagaaaaggcagagacaggcaagacagcatctcacagcttgtcaggatcagggcattaccgactattttttcttaccaaaagagcactgaatttcctaggggaaggtgagccacctttacacctcctgtcctccctcccagcccgtcaagcgatcccatcacccagcctcatcactcagcttcttcctagtacaaaactgccatcggttgtacgtcctgagctgtgggacgtcagctttaaccctagcctgtctcagggcctcgccctccagccccccgccccttagggtgatcgtgggtttcttcccttcctcctgcacaatcgcttcccttcactgaattcccttcaaagccaaagtttcttgagcactttttcttgtgtgcagtcttgtgtgtttgggtgttggtgtttttaaatttgctttctattcccccctgcctctctccatgtcgttacgcagctgagcactggttgggatgcattcgaatgacttcagcaagatcctgctttcctcagcccccgctctgttttatttattgtttaatatttccaatgatccaaatcaaagtgaataaacaaagagctattttataaaaaaaaaaaaaaa

SEQ ID NO: 27968 - DNA, 2340 bp, Homo Sapiens
aaagaataattctgtatataaacagtggaggtagataaatctatcttcttttatagtcctatctctcctatttataaaaatctacaaaaaccaggtattttctcattattttaatggaattatttcctaacaaacttgatggtattggataaaattaaagtttattctaaactgttaagttgtaggtccttggaaaatttgctttgttaactcttttgtcatgtggagagagagagagatggaggggagagaattagttagctagggttcttaagaatacctttaatcattacataccctgtatttttaaatagctatgttttgcccctcaaaaagtattcaaaataaatactaacagaaattcaatattgtaatatattttagtaatttttttgtatcttaatgttaggtcttcaaacatgaactagcttacttattggctggaattcttggagcagcaatagattattggattttccttggtcttaagatgggtagaaatgtgatgcgacacatgtctgatgacttaggaagttatgtttctctttcgtgtgatgacttttcttcacaggaattagagattttcatttgctccttttcctcctcctggcttcaaatgtttgttgcagaggcagtctttaaaaagttgtgtctacagagctctggcagtgtttcttctgagccactctctcttcagaaaatggtatattcctatttaccagccttggggaaaactggtgtgcttgggtctggaaagattcaggtgtcaaagaaaataggacagcggccttgttttgactctcagagaaccttactaatgctgaatggtactaaacaaaaacaagtcgaagggctgccagagttactagacctgaaccttgctaaatgttcctcatcattaaaaaaattgaaaaagaagtcagaaggagaattgtcatgttccaaggagaattgcccctctgtagttaaaaagatgaattttcacaagactaatctaaaaggagaaacagccctgcatagagcttgcataaataaccaagtggagaaattgattcttcttctctctttgccaggaatagacatcaatgttaaagacaatgctggctggacgcctttgcatgaagcctgtaactatggcaacacagtgtgtgtccaggaaattttgcaacgttgtccagaggtagatctgctcactcaagtggacggggtgactcctttgcatgatgcactgtcaaacggacatgtagaaattggcaagctgctactacagcatgggggcccagtgcttttacaacagaggaatgctaagggagaattgcccttggattatgtggtttcacctcaaatcaaagaagaactgtttgctattacaaaaatagaagatacagtggagaactttcatgcacaagcagagaaacattttcattaccagcaacttgaatttggctcctttttacttagtaggatgttgctaaatttttgttcaatttttgatttatcttcagagttcattttagcttccaaagggttaactcatctaaatgaactgcttatggcttgtaaaagtcataaagaaaccaccagtgttcatactgactggttactggatctttatgctggaaatataaagacattgcagaaactcccacacattcttaaggaactgcctgagaatttgaaagtgtgtcctggggtacacactgaggccttgatgataacattggaaatgatgtgtcggtcagtcatggagttttcatgatgatgctagaaagtatggattgactttctaaatctgttcagtttgcattggtacttactgtggacttcatagcttactgacagatagtaatttgatttatttattgacagactttgcagccttgctaaattttaaaagcatttttaaaaaaacttctacaaaactctagtatgggcttctgactttttccagggtgtagaatttgactcaaaagtaaaaataattttgttttagtatattctactttcattaatgtttttttgttctgaaagtgatattatattgtacatgtaaaattaatttaaatattttttcaaataaaaatgtaatgtcctgtattctagatgttctaggtcttagaatcatggcaagcatattcatacaaatgcgtacctataaacttgtagctcctgactcttagggatggattttgaggaaaaaacaagactaaacaaaaacatgtagctccctatttcttctctctaggttgttggactgaaatatgcattttagctttgtgtgtttctaaaataaacatttctaaaatttacagtaaaaaaaaaaacaaaaaaaaaaaaaaa

SEQ ID NO: 27969 - DNA, 2541 bp, Homo Sapiens
gggagcaagggcggaccccgagagatgactgattgtgggggtggggaccgtctgctcctcctaatggctggggaccgtgcacgtctgcgcgggccggacctgctcttctcgggaacttgcgcgggaggaggcccggagctgcgccgctttaccctctgctccccggtgcctaaaacgcacacgcatcaaagtcacaggacgagttagaggagaaaggcagagggagatttgaaacacagaggaggtgatgagaagacacagcagaagatatctgaagactggaaagaatgctgcaaccaacaggagaaggaaaagacagaaatgtgttttccatttggagcatccagagggagcacaaccatatcaacaccttgattttgatctagtgacattgattttggacttgtggcctccagaacttttagagaataaatttgcattgttttaagccaacaggttggtggaaattttttacagcagccacaggaagcaaacacagactcctaactggtgcttagtcctagaatatcagtttctgttccacttctggatctcataattgcatctcagacatcaacactgacttcatattcttaatgcaccaattctaccatttcttcaggctgcaaacagagaaaaacttatttaagcattccagaattgacccaatagaagactctccagaaaagactgcatggtctctgaagcagcatgatcagcatgactggctgcatctgggctccaccgtttgccacttcagacaggtccttagcctcttagaggttcattttccttgctgtagcccggagtaagaatgtttagcctacaagatttattttgaggcatcaatgaatcactatgtgagcctcacacagtgtctggcactgatattacaaaatatggttgatcttgccatccttgttattgtcctggtggggattcctctctgttgaagatacggagcctctaaaaatgagtggcagaggctcccagctcaggatccttgtccaggtcctaaagatcctccactctgcttgtcactctgttcattatgtttgcatggccaccacggtcaacactactgcggcctacctcaagttctcatgcctcactctctgagctcatgaggacacaaggatcctttggcaacacattaactacactctgtggccatcccttgacttctgagaggatgtttccctcctctcaatcaaaagctctcttccctcctgggcaagatccttgcatgcacccagcaccctcacacctggtgccctcacacccagcactctcacacgtggtgccctcacacccagcaccctcacacctggtgccctcacacccagcaccctcacacctggtgccctcgcacccagcaccctcacacctggtgccctcacacccagtgccctcacacccagcactctcacacttgcactgtcctcatcccaactctgtggttcctctggggaatcactgtggaatccctcatgggaggatgttttcaaaagaaacaacagcccaatgaagggtatttgaggatgagaagcaggaaagaagtcagtgggtggctgagttgtgtccaggttttgcgtggccatggaaaatcaggtgaaggacattaaatatcttgcagtggcttctccattaggagcatgaaatgaggaaaggggctgtcctcacaggccagccaagagggatgcctatgccaaacagaaagactgacagtaaacagaatccaggatgacatgactgaggtatggtgtgcagggcatggcccagggaggagggtagataagtaagcctgggtgcaccttcagaggaagaaataacagaggctgcaggcgagagagttacaaggaaggaggagcaggaagacacgagaaaaattcagataaactcaacatctccagcctgggggaaacgtgagagggtggtatgaagatacacacgatgcatgttgcttagtgaaagcagccagtcggaaaaggctacgtagtgaatgaccccaactatgacattctgaaaaaggcaaaactatggagacaggataaagatcagtggttgccagtgaggcaggagaatagggtctgggggcagggagcctaaggctgattcatgctgacttcatgaacggaatcaaaaggaaaaccctaaatttccatgcccacgtaacaaaaggatcagaggctactccctttgcaactccccccaactttctgtgttgcagatgaaagatggaaagtgcctcggattggtcccctcctgcaaccagtcagacatctgcatagagcgtaactttgtaacttcacttcagcctctgcttggtcaccttccacaaccaatcagactggtcatgggccactatttcatagggtgtaaaccaagtgaccaatgggaaacatctagagggtatttaaaccccagaaaattctgcgaccagtgcttttgagccttgcttgggcctgctcccactctgtgaagtgcatttttgtttcaatacagctatgcttttgttgcttctttaaaaaaaaaaaaaaa

SEQ ID NO: 27970 - DNA, 2969 bp, Homo Sapiens
ataaactattctttggttagcattagtaatgcttgtagacactcaaacaaggaaggcgaagtcctgatgatgatttattgtatcaatacctcattttatttggttgtggtctcagtttgcctcactggagaatccactaagaaagatggattttaatgggaagaaaagaattattttctacatcgttcctcatctcttgagtttgtcaaaaagttttctaagaggcagtgtgaagagccagagatgtccgaaattgcctgacttcatgttttggaagattcctaagtcacatgaaatcatctatcaaacacttgtcttccaaacggtgtgaaaaactacagccaagatagcagttagcattcaaggaagccttaaagattgtgattatgtttttttttcctttgcgtgtgggcactatgctttattagaacacattatttttaatcatagtattttttctttgcctctaagaaaatactttcttaatgctcagaaagttgcttccaattaatgtttttttccccttaaaaagagaagctttgagagatatttttgctttcatagctagaacagttgaagtcttcaactgaggttttatagcagattagacatgggtaaatgatgtctgtaatgggttgagttactgagatgacaatctcctgtgccatttggtttgaatgtacttgataggctgcttcaaatcagtcacttcaatgcattttgtgtaaacccagttgtccttttttattcctctttagacataaatgtgctaactattcctttctatacacaatttattttctaagattaaaaataataattgctaggtttggtggcacatgcgtacagccccagctacttaggaggctgaagcaggaggatccctagagcccaggagttctgggctgtggtacactatgccagttgggtgtaagtttggcatcaatatggtgatgtccctgaagcaggaaaccacaaacttgcatcaggacgggtgaacccagcccaggttggaaatggagcaggccaaaactcccaggctgatcagtaatgggatcttgcctatgaatagccagtgcactgcagccaggacaacagagtgagaacctgtctttaaaaaaaaaaaaaaaaaaaaaaaaaaaggtaatatttattatattattcaggtttcaactctgtagcaaaaatgggctctcatttccctaacttgagataacatagggtaggtccatatattttcattcttacagtggtcttttcatgggagtgaatgagttactctccactggtgattaggtaatactgtagaatgaagagttgtataatatattcatttacagctgtggattgtggtaaggactatgtccacagtgatattccaaagaattgggtttatatttgtgcttcatctgttaatcccaggtgtcctcatgttgctgaaatatttagatagctaaaatatcccttaatttcacagatgaccaggaagaaattaaccaaggttttattgactgccatgtatgtcccatgatgcatttctgagcaaatgcttatcctagagaataactctgtatgaataaaattgcttaattgagtctcttactaaataagtaactagtgccatgcttttgtgagctcttggtatggcccatattactttgttttttgtttttgttattgttgttttgtgatagtcttgctctgtcgcccaggctgcagtgcagtggcacaatctcagctcactgcaacctctgcctcctgggttcaagcaattctcctgtctcagcctcctgggtagctgggactacaggtgcatgccaccatgcctggctaacttttgtatttttagtagagacagggtttcaccacgttggtcaggctggtctcgaattcctaacctcaggtgatccacctgccttggcctcccaaagtgctgagattacaggcgtgagccaccgcgcctggcctgtttgtttttttaacatgatttttctctaagcttaaataccacaaggccaaagagaaatggtcataatttaaaccattattatattgttgaggtatccctagctattattatagcaaagtgggaaaaaagtgtttattctattgaagttatgtaatgatccgacattaatgggaatatagaggagtcctaattaattggtataatttcacaaagcggaatggtattccttggagagttaaagacattctctttagtaagtgtaaaccaaagggcattttctttattcctgcttctaattccttctagcccagtgaattatttctcttttcactggtaatgtgatgaatgggaattgtttattacattgaagtgacttgaagtgaccttttgtgctttaggtgcaggttgacactgaaaaaaaaacaaaacactgaatttttcacacctatgtctgcattaaaggctgttttactaccggaagttacatagacttcctgcagtcagctgctgtgccccagtgccttactggtcctttgtagatttgccttaatgatttgtacaaatgactgggaggcggggatgctgcctgtgtcctggtgaaccttaatgaaggggccgtcttaggcacagtgcaaaacaagcatttgtcctgtactgttagagccaaaattgtgatgagcaatactgataattgtccagtttatgtcatctttcccagattttaaaatctgttctagatattcttagcttgaaccacttttgattgtgaaatgtattaggtgttgtcccattattactgtaaaatgaagttttgaatcttcttgttaataaactgtggatttcccctctcaatttcttaaacaacaacaaaaaaatgcttgaagattgtctttgagtgtaagatctgccttttcagaaagggagtgttagtttgtaatgttaaaaaataaagacctcattcaataaaagttgaagtcatcaaaaaaaaaaaaaaaaaaaa

SEQ ID NO: 27971 - DNA, 2651 bp, Homo Sapiens
cgagcgcccttacaagtgtgactttcccggctgtgagaagacatttatcacagtgagtgccctgttttcccataaccgagcccacttcagggaacaagagctcttttcctgctcctttcctgggtgcagcaagcagtatgataaagcctgtcggctgaaaattcacctgcggagccatacaggtgaaagaccatttatttgtgactctgacagctgtggctggaccttcaccagcatgtccaaacttctaaggcacagaaggaaacatgacgatgaccggaggtttacctgccctgtcgagggctgtgggaaatcattcaccagagcagagcatctgaaaggccacagcataacccacctaggcacaaagccgttcgagtgtcctgtggaaggatgttgcgcgaggttctccgctcgtagcagtctgtacattcactctaagaaacacgtgcaggatgtgggtgctccgaaaagccgttgcccagtttctacctgcaacagactcttcacctccaagcacagcatgaaggcgcacatggtcagacagcacagccggcgccaagatctcttacctcagctagaagctccgagttctcttactcccagcagtgaactcagcagcccaggccaaagtgagctcactaacatggatcttgctgcactcttctctgacacacctgccaatgctagtggttctgcaggtgggtcggatgaggctctgaactccggaatcctgactattgacgtcacttctgtgagctcctctctgggagggaacctccctgctaataatagctccctagggccgatggaacccctggtcctggtggcccacagtgatattcccccaagcctggacagccctctggttctcgggacagcagccacggttctgcagcagggcagcttcagtgtggatgacgtgcagactgtgagtgcaggagcattaggctgtctggtggctctgcccatgaagaacttgagtgacgacccactggctttgacctccaatagtaacttagcagcacatatcaccacaccgacctcttcgagcaccccccgagaaaatgccagtgtcccggaactgctggctccaatcaaggtggagccggactcgccttctcgcccaggagcagttgggcagcaggaaggaagccatgggctgccccagtccacgttgcccagtccagcagagcagcacggtgcccaggacacagagctcagtgcaggcactggcaacttctatttggtatgaagcactctattcagtcaccaccatataggtcacttctctcatactcggtcttgaggatattctggattaatcctttctatgcagacgtttctggtttacaaaaggacgcagccctggactacaagtctggaactgacaagttcttatgaccttgacaaatcaccttaacccatctgagccttaaattctcatttatttcctgcataaggagatttggctaaatgctttctgaggtcctttggagtcctgtggctccatggagcctcacagtctactcagagaaaaataaaagaaggcaaaatgagtcctccccatttccatgcaagccagaacagttggttgtgtgggagcctcgtggtgcccagcggaggacggccaggaccagctccagcagctggggtgcagtgcggggcgcagggcgtccaggtccagctggtgcaggatgacccctccggcgaaggtgtcctgccctcggcccgcggcccagccaccttcctccccttcctcactgtggacctgcccgtctacgtcctccaggaggtgctcccctcatctggaggccctgctggaccggaggccacccagttcccaggaagcactatcaacctgcaggatctgcagtgacggcagcctcggcctgggcaggcccaaggccacggtctaggacacaccttccctgagactcatgacatgagcctggggagacctcatttggtttccgttcagaagaccagcgtagcccttttgagacttttgggtacatttatcaaaaatgttttccttttgttttaccaggaatgagttcgggctatactctttgaaactgcctttgtgagcaaagtgctttggcaaggcaagggtctccctcagcagggctaggtgcactacagcctctttccccgtgtcccgttggatctgagctgtgtagcacttgttgcattacaaagaaaaagacttctgcaggaaatagggtagagaacaggctgtctagtcagatgcagcttgatctgtggcaaaaccaagtgtggtctttcagcttcagtgtgttagcatcccagcacctgggatggggtttgtgggcaagttgattttgccacactgtagggcccaggtggtcccattgccaccgtgaagccaaattctagcccaagtctggtagagcagtcgggcagctagttttcgggggaggatgatgtggtgggacagaggacctcagtggcctattacggagccctcttcccagactaaattcatagccgagagctcggggggatggtagagttaaaatttaaaataattttctaaattctgtatttggatattagtgtttaagtggtaatttggcaacagtttataaagtgatgttctgaataccataaaaaaaaaaaaaaaaaaa

SEQ ID NO: 27972 - DNA, 3087 bp, Homo Sapiens
cggacgcgtgggcgcgctgccccctttaccccgggccgcgccccggggccccgcactgacggcccatggcgccgcccgccgcccgcctcgccctgctctccgccgcggcgctcacgctggcggcccggcccgcgcctagccccggcctcggccccggacccgagtgtttcacagccaatggtgcggattataggggaacacagaactggacagcactacaaggcgggaagccatgtctgttttggaacgagactttccagcatccatacaacactctgaaataccccaacggggaggggggcctgggtgagcacaactattgcagaaatccagatggagacgtgagcccctggtgctatgtggcagagcacgaggatggtgtctactggaagtactgtgagatacctgcttgccagatgcctggaaaccttggctgctacaaggatcatggaaacccacctcctctaactggcaccagtaaaacgtccaacaaactcaccatacaaacttgcatcagtttttgtcggagtcagaggttcaagtttgctgggatggagtcaggctatgcttgcttctgtggaaacaatcctgattactggaagtacggggaggcagccagtaccgaatgcaacagcgtctgcttcggggatcacacccaaccctgtggtggcgatggcaggatcatcctctttgatactctcgtgggcgcctgcggtgggaactactcagccatgtcttctgtggtctattcccctgacttccccgacacctatgccacggggagggtctgctactggaccatccgggttccgggggcctcccacatccacttcagcttccccctatttgacatcagggactcggcggacatggtggagcttctggatggctacacccaccgtgtcctagcccgcttccacgggaggagccgcccacctctgtccttcaacgtctctctggacttcgtcatcttgtatttcttctctgatcgcatcaatcaggcccagggatttgctgttttataccaagccgtcaaggaagaactgccacaggagaggcccgctgtcaaccagacggtggccgaggtgatcacggagcaggccaacctcagtgtcagcgctgcccggtcctccaaagtcctctatgtcatcaccaccagccccagccacccacctcagactgtcccaggatggacagtctatggtctggcaactctcctcatcctcacagtcacagccattgtagcaaagatacttctgcacgtcacattcaaatcccatcgtgttcctgcttcaggggaccttagggattgtcatcaaccagggacttcgggggaaatctggagcattttttacaagccttccacttcaatttccatctttaagaagaaactcaagggtcagagtcaacaagatgaccgcaatccccttgtgagtgactaaaaaccccactgtgcctaggacttgaggtccctctttgagctcaaggctgccgtggtcaacctctcctgtggttcttctctgacagactcttcccctcctctccctctgcctcggcctcttcggggaaaccctcctcctacagactaggaagaggcaccctgctgccagggcaggcagagcctggattcctcctgcttcatcgattgcacttaggagagagactcaaagccctggggcccggccctctctgcatctctctctgatctagctagcagtgggggtgtcaggacagtgaggctgagatgacagaggtggtcatggctggcacagggctcaggtacattctagatggctgtcaggtggtgggtagctttagttacattgaatttttcttgcttctctatttttgtccacacacaaatcagtttctcctgatctttatgtcttggaacagggccagacagggagaactctcaggtactcttgggagttggtcccatacaagtgcggactcctggacattagcgaggtgtaaagagggcagtgtctgtgctgccccggcagctttgctctccagatgctggactagggtgggcctccttcagcctgggagggtctgagaataagatctagtgacccccatttatatcaaacctgataccttacacatgggcttctttctagattcttctttccatagctcatggagctgcagggaaagctttaagagctttggtcatataaaacatccattcagctgggcgcgatggctcatgcctgtaatcccagcactgtgggaggctgaggcgggcagatcacctgaggtcaggagttcgagaccagcctggccaacatggtgaaaccccgtctctactaaaaatataaaaattagtcaggcgtggtggcaggcgcctgtaatcccagctactcagaaggctgagacagaagaacagcttgaacccaggaggctgagattgcagtgagccgagatcgcaccactgcactccagcctgggtgacaagagtgagactctgtctcaaaaaaacaaaacacaaataaacaaaaaaaatccattcatttactcatgcaataaattctcctgcaagcttttatgggcactcagtaagtactcaggattggctttatcagccttgccactgagcagctcatggtcctatggaacctgagccaggcctcagtctctccatgattggctcagctaactctcagttcagagtggagagtatcaatcttgtgtttttgcccttaggcagcactatatgagacatggggcctgtggtccttccttctggtgtcccccgtgttaaaagataaaaaacaccccaagggccgggcgcggtggctcatgcctgtaatcccagcactttgggaggctgaggcgggtggatcacgaggtcaggtgatcgaaaccatcctggctaagacggtgaaaccccgtctctactaaaaatacaaaaaattagctgggtgtggtggtgggcgcctgtagtcccagctgctcgggaggctgaggcaggagaatggcgtgaacccgggaggcggagcttgcagtgagcagagatcacgccactgcactccagcctgggtgacagtgcaagactctgtctcaaaaaaaaaaaaaaaa

SEQ ID NO: 27973 - DNA, 3818 bp, Homo Sapiens
ttggacactactctaggaccgggtaactataactacccaatattgcagccatggagtccatgcttaataaattgaagagtactgttacaaaagtaacagctgatgtcactagtgctgtaatgggaaatcctgtcactagagaatttgatgttggtcgacacattgccagtggtggcaatgggctagcttggaagatttttaatggcacaaaaaagtcaacaaagcaggaagtggcagtttttgtctttgataaaaaactgattgacaagtatcaaaaatttgaaaaggatcaaatcattgattctctaaaacgaggagtccaacagttaactcggcttcgacaccctcgacttcttactgtccagcatcctttagaagaatccagggattgcttggcattttgtacagaaccagtttttgccagtttagccaatgttcttggtaactgggaaaatctaccttcccctatatctccagacattaaggattataaactttatgatgtagaaaccaaatatggtttgcttcaggtttctgaaggattgtcattcttgcatagcagtgtgaaaatggtgcatggaaatatcactcctgaaaatataattttgaataaaagtggagcctggaaaataatgggttttgatttttgtgtatcatcaaccaatccttctgaacaagagcctaaatttccttgtaaagaatgggacccaaatttaccttcattgtgtcttccaaatcctgaatatttggctcctgaatacatactttctgtgagctgtgaaacagccagtgatatgtattctttaggaactgttatgtatgctgtatttaataaagggaaacctatatttgaagtcaacaagcaagatatttacaagagtttcagtaggcagttggatcagttgagtcgtttaggatctagttcacttacaaatatacctgaggaagttcgtgaacatgtaaagctactgttaaatgtaactccgactgtaagaccagatgcagatcaaatgacaaagattcccttctttgatgatgttggtgcagtaacactgcaatattttgataccttattccaaagagataatcttcagaaatcacagtttttcaaaggactgccaaaggttctaccaaaactgcccaagcgtgtcattgtgcagagaattttgccttgtttgacttcagaatttgtaaaccctgacatggtaccttttgttttgcccaatgttctacttattgctgaggaatgcaccaaagaagaatatgtcaaattaattcttcctgaacttggccctgtgtttaagcagcaggagccaatccagattttgttaattttcctacaaaaaatggatttgctactaaccaaaacccctcctgatgagataaagaacagtgttctacccatggtttacagagcactagaagctccttccattcagatccaggagctctgtctaaacatcattccaacctttgcaaatcttatagactacccatccatgaaaaacgctttgataccaagaattaaaaatgcttgtctacaaacatcttcccttgcggttcgtgtaaattcattagtgtgcttaggaaagattttggaatacttggataagtggtttgtacttgatgatatcctacccttcttacaacaaattccatccaaggaacctgcggtcctcatgggaattttaggtatttacaaatgtacttttactcataagaagttgggaatcaccaaagagcagctggccggaaaagtgttgcctcatcttattcccctgagtattgaaaacaatcttaatcttaatcagttcaattctttcatttccgtcataaaagaaatgcttaatagattggagtctgaacataagactaaactggagcaacttcatataatgcaagaacagcagaaatctttggatataggaaatcaaatgaatgtttctgaggagatgaaagttacaaatattgggaatcagcaaattgacaaagtttttaacaacattggagcagaccttctgactggcagtgagtccgaaaataaagaggacgggttacagaataaacataaaagagcatcacttacacttgaagaaaaacaaaaattagcaaaagaacaagagcaggcacagaagctgaaaagccagcagcctcttaaaccccaagtgcacacacctgttgctactgttaaacagactaaggacttgacagacacactgatggataatatgtcatccttgaccagcctttctgttagtacccctaaatcttctgcttcaagtactttcacttctgttccttccatgggcattggtatgatgttttctacaccaactgataatacaaagagaaatttgacaaatggcctaaatgccaatatgggctttcagacttcaggattcaacatgcccgttaatacaaaccagaacttctacagtagtccaagcacagttggagtgaccaagatgactctgggaacacctcccactttgccaaacttcaatgctttgagtgttcctcctgctggtgcaaagcagacccaacaaagacccacagatatgtctgcccttaataatctctttggccctcagaaacccaaagttagcatgaaccagttatcacaacagaaaccaaatcagtggcttaatcagtttgtacctcctcaaggttctccaactatgggcagttcagtaatggggacacagatgaacgtgataggacaatctgcttttggtatgcagggtaatcctttctttaacccacagaactttgcacagccaccaactactatgaccaatagcagttcagctagcaatgatttaaaagatctttttgggtgaggtgtcttacttctattttgaaggattatttcagtttcaatcatgggtgagctgatttacatctttatatagttggcttggaggaagtacttctatgggaaagtgaacagttctgtgacaggaaacatctctgtccatgccagcatagtagttgtatggacttctaaccagttgagttttttaaagcattgaggattttttcctcttaccaactcctcttcaggtttttaaagacccagcccttcccaatctcaaagagaaaaaggaaactgagttatcttgaataacataactttttaatcaaatgtttattttggcttgtggatcttggtgttatttaaaaaattgaggtgatggtcattgcaagctcatctattaagtactatatggtacacagtctatgagtcattagtcttcattttaatatgtaaaaaatcttgatgctgtattgatttgtttgcatttaagatgacagtgagaaaatgataagcataaagagaagtatcaggttatttgctttttccaaacttttcagatgaactattgtttagtacagagactgagcaaatactacaaaattcaacttaaccttcatttcattggtttaaatgcgttattaaccatcttaagtgcaaactaatcattgtaaattatattttagcatggtctgcctcaaatagtaatgtatttttctgcattcacttggatatatttagaatcacttttttcctcctgtatcaaggaagaggtatgtgctgatttgtttggatatttgacaaggcactctgatgtgacttccctgactactaccttcatatttcatttcaaattcaaacttctgaggttgcagcatatatgaattgcattttcaaaagaagatttgtaagaattaaactatatttatgagtaaacttttgaggtttctgctgtattgtttcaaatgtaataaactttacttctgtaaaaaaaaaaaaaaaa

SEQ ID NO: 27974 - DNA, 4257 bp, Homo Sapiens
ggtgtggtaccgggtacccggagacgtgtatcggacggtgggccgcagccatggccgagagaaaacctaacggtggcagcggcggcgcctccacttcctcatcgggcactaacttacttttctcctcctcggccacggagttcagcttcaatgtgcccttcatcccagtcacccaggcctccgcttctccggcctccctgctcttaccgggagaggattccacagatgttggtgaggaggacagcttccttggtcagacttctattcacacatctgccccacagacatttagttacttctctcaggtatcaagcagcagtgatccttttgggaatattggacagtcaccattaacaactgcagcaacctcagttggacaatcaggattccccaagcccctgactgctctcccttttacaactggatcccaagatgtctcgaatgcattttcaccatccatttcgaaggctcaacctggtgctccaccttcctcactgatgggaataaattcttatctgccttctcagccaagtagtctccctccttcatattttgggaaccaaccccaaggaattccccaaccaggatacaatccatatcgccatacccctggcagcagcagggctaatccttacattgcaccaccccagctgcagcagtgccaaacaccaggccctcctgctcatcctccaccttctggaccccctgttcagatgtaccagatgcctccaggatctttgccaccggttccttcttcagtgcagtcaccggcacagcagcaggtacctgccagacctggggctccctctgttcaagtgccatctccttttctacttcaaaaccaatatgagcctgttcagccccactggttttactgcaaggaggtagaatacaaacaactgtggatgccttttagtgtgttcgactctttgaatcttgaagaaatctataattcagttcagccagatccggagagcgtggttcttggcacggatggagggcgctacgatgtttacctctatgaccgaataaggaaggctgcctactgggaagaggagccagccgaagtgagacgctgtacttggttttacaagggggacacagatagtcgatttattccctatactgaggagttcagtgaaaaactagaggctgaatataaaaaagctgtaaccactaatcagtggcaccgaagattagagtttccaagtggagagacaattgttatgcacaatccaaaggttattgttcagttccagccctcctcagtgccagatgaatggggcaccacgcaagatggacagacaaggcccagggttgtaaagcgtggaattgatgataaccttgatgaaattcccgacggggagatgcctcaagttgaccatttggtgtttgtggtgcatggcattggacctgtgtgtgacttacgctttaggagcattattgagtgtgtggatgattttagggtggtttctctcaaattgctgcggacacatttcaagaaatctttagatgacgggaaagtaagcagagtggagttccttccagttcattggcatagttctttgggtggggacgccacaggtgtggacaggaatattaagaaaatcactttgccaagtattggtcgatttcgtcactttaccaatgaaactttgctagatattttattttataacagccccacctactgtcagacaattgtggaaaaagtaggaatggagataaaccatctgcatgcactctttatgagtcggaacccagacttcaaaggaggtgtctctgttgctggtcacagtttaggttctttaatattgtttgacatcctgtctaatcaaaaagatttgaatttatcaaagtgccctggacctcttgctgttgctaatggagttgtgaagcagctacattttcaggaaaagcagatgcctgaagagccaaagctgactttggatgagtcgtatgaccttgttgttgaaaataaagaagtcctaactttgcaagaaactctggaagcacttagcctctctgaatattttagcacttttgaaaaggaaaagattgatatggagtccctgcttatgtgtacagttgatgacctgaaggaaatggggataccccttggacccagaaagaagatagctaactttgtagaacataaagcagccaaactgaaaaaagcagcgtcagaaaagaaggcagtggcggccacttctacaaaaggacaagagcaaagtgcccagaagactaaagacatggcttccctcccctcagaatccaatgagccaaagaggaaacttccagttggtgcttgcgtgtcttctgtgtgtgtgaattatgaatcttttgaagttggcgccggacaggtttctgttgcttacaactcattagattttgaaccagagatattctttgccttggggtctccaattgctatgtttctcactattcgaggagttgataggatagatgagaattacagccttcctacctgtaaagggttcttcaatatttatcatccgcttgatccagtggcatatagattagaacctatgattgttccagatttggacctaaaagctgttctcattccacatcacaaaggcagaaaaagacttcatttagaattgaaagagagtctctctcgtatgggatctgatttgaagcagggttttattagctctctcaaaagtgcttggcagacattaaatgagtttgcccgtgctcatacgtcttcaacccagttgcaagaagaattggagaaggtggccaatcagatcaaagaagaagaagaaaagcaagtagttgaagcagaaaaggttgttgaaagtccagatttttccaaggatgaggactacttaggaaaggttggaatgttaaatggaggccgccgaattgactacgttctccaagaaaaaccaatagagagttttaatgaataccttttcgctcttcagagtcacttatgctattgggaatctgaagatactgctctgttactacttaaagaaatttatcgaacaatgaacattagtccagaacagccccagcattgatcaaacttcagttttactgtactttcttgtctgcacagaaagtcccagtacaacttccattgctgagaaaatcctcagaggactttcccacttcgctcctgtgatggatgacagaagagtgattcattaacaattgctcagccacaattctcggatatagggattcaaaagacaggacacagaactaacacagtgaaaaaaatcagtaccacatttggacagtataggtgagaaaacataattataaaaatgatgccatgaaaaattccacagatcagtttagttgtatagttgtcaaagttatatgtgatatcaatgaagaaatatttgtagcatgtaaacggttatttctgtttcttaaaaagtattgttagtgggctattaaacttggatttttctttttattaatgcagtatgttctttttattcaagtatgaacttgttgagaaactatagtaatatgatttttaagagatttatgttctacttaaaatgtgaattgtacttctgagctgccttaatgcaaggtcatttatatttgttaagaggaaataatcaagatcactcatatcccaactgaatctgaggttttataaatccctcaaacgattgctgagagcctgattgtggaaagaagtgagatgcaccttattttcaagaagtcctgggaagcgctctcctagcacgtccatttccaggaggagaagcaagcagatgagaggttttccattttgtcatccaaggtagctgtgcacttgccttgttgctgaagttccaataatgtgaaaaccaaagtagaggtttttttcttcttctttttgttttctattaatttcacttataccaaagtgtttgaaagtatgaaatgtgttgcttctgagttatataaggctacttcatgacaagactgctttgtaatatttcactttgttttactacaaattcagatcactttgttttactataaattcagattatccaaatattttcctaatactatgtgggaatgctgattttcttttgttacgtagtggaaacattttgcattgtttacatagttctcatggaacatggaaatttttgaaagtgatatatgatacacattttttgtgtatgtattctaattagtgtgaataaagcagtaacattaatgcattttttaagcagcaaaaaaaaaaaaaaaaaaaaaaaaaaaaaaaaaaaa

SEQ ID NO: 27975 - DNA, 4103 bp, Homo Sapiens
cccacgcgtccgcttagtgggtatctgatgtgtagccatgcagaagacctacgtgcaaaagcagaatgggaaggcaaagggacagcttcccgatctaaactattggataaacttcagacctatttaccaccatcagtgatgcttcccccacggcgtttacagactctcctgcggcaggcggtggaactacaaagggatcggtgcctatatcacaataccaaacttgataataatctagattctgtgtctctgcttatagaccatgtttgtagtaggaggcagttcccatgttatacgcagcagatacttacggagcattgtaatgaagtgtggttctgtaaattctctaatgatggcactaaactagcaacaggatcaaaagatacaacagttatcatatggcaagttgatccggatacacacctgctaaaactgcttaaaacattagaaggacatgcttatggcgtttcttatattgcatggagtccagatgacaactatcttgttgcttgtggcccagatgactgctctgagctttggctttggaatgtacaaacaggagaactaaggacaaaaatgagccagtctcatgaagacagtttgacaagtgtggcttggaatccagatgggaagcgctttgtgactggaggtcagcgtgggcagttctatcagtgtgacttagatggtaatctccttgactcctgggaaggggtaagagtgcaatgcctttggtgcttgagtgatggaaagactgttctggcatcagatacacaccagcgaattcggggctataacttcgaggaccttacagataggaacatagtacaagaagatcatcctattatgtcttttactatttcaaaaaatggccgattagctttgttaaatgtagcaactcagggagttcatttatgggacttgcaagacagagttttagtaagaaagtatcaaggtgttacacaagggttttatacaattcattcatgttttggaggccataatgaagacttcatcgctagtggcagtgaagatcacaaggtttacatctggcacaaacgtagtgaactgccaattgcggagctgacagggcacacacgtacagtaaactgtgtgagctggaacccacagattccatccatgatggccagcgcctcagatgatggcactgttagaatatggggaccagcaccttttatagaccaccagaatattgaagaggaatgcagtagcatggatagttgatggtgaatttggagcagacgacttctgtttaacttaaaattagtcgtattttaatggcttgggatttggtgcaaacaaacatgattgatagctggacagacatgctcgtcatgaaaaaagaaccatttctgaagcccgattggggccaaacatttacaccttgcttcatagtaaccagttgagatgaagcacgtcgttagaacgttgttggacaccatgttgaattattcccccatcggttgtgaagaactgtgctacattcaggcttacccattgaactcagtatatatttttttccttcctgtcttttgtctggcaggataccattcttgttgctcttctgtgtaatgaagtttaaatgcttgtttggaaaactttatttaacagtttagaaggcttgatagaaagagtgcattagtctgaagagtatacattggataggaaagaatttccttcttttgtttctccaaatctttccgccttatttagcttgagatctttgcagcttggttcatggattctagccttgcccgttgcgcagtatatactgatccagatgataaaccagtgaactatgtcaaaagcactctcaatattacatttgacaaaaagttttgtacttttcacatagcttgttgccccgtaaaagggttaacagcacaattttttaaaaataaattaagaagtatttataggattaaagtgacttcatttgtatacatttggaatctaaaccagcttaaaaacagtttcctcaatgacttagatacacagtataactgatgctcttctggaataccacatgagacatggtcagaaacagtgcttggaaggacattacacaagaaattcagagtaatgctttgaagatttccccccttttgttttattcctgaaggaacatcagtacccgatcttgaagaaattcaagattcaaaaagaattttaaatacaccaacatgagacatcagtagtcagttggttttcagtaaagcttgttccaagttgttctcaacttaggaagtaattttggtgtgatctagcaaaagagtaggaatcagcgatacaaccactttggaagtttatagtataattgaaattattagaagaattcagcaggttacagacatacttaaactgggattaaaacctcatagtcatttttcttaattgcccttaatattttgacatatagggatacataaatttaaagaatattttttctcagttttttcagatattgccatactgaacctcattctaaactggtgctgtggatagtctttccctctcccctcctgttttagtttaaggaaaggtttccttcatggaaaagcacttttaattttgagaatttcacatttaaaataagccaaaagcctgatgttcacattgtgcttttaaactccgtaacagctgaatacaacataacatagtctcccttgaaattccctccctttttcagtagaggataaatagggtgactccagctgttggaatgagaatggggatacccccaaaataagattctggtgaagaaaaagtcttgtactaagttcccctttaggtgtagccaagtctataatataattatgatcatgaatagactccagaatccacaaagagaagagggcttggatgtcaaaaattcttccattgttgggtaggtggtcggggatgggagaaagggaaaagtcagggaaggggagaagaaagaaaaacacatttggccttaaaatagcatgcattctcccagaagcccatagtaaagaaaatgacagatcgtggtcagcagactcttatcaaattggtatgtaaaagatttcttcaagctccattttgcagagaccaccacttagagaatcaaaaaattcctgttttgatacttctaagttaaaatatatgttacagtttatctggtacttcatttttcttaactaaaattactttttactttaagcttgaataaaaatcttcattggtaactgtatgtaattaagtggcaacttctctttacctcagtatagttaaaaaccattcatattttaagtgattcatgtataccctgaagccgttaatacaccccagtctctatggtaacatcactaaatgtgggcatagaaactccacagctgtttacaaatttggttacagtgtgctacggtgcatttgtaacactcagatttgtgcccattcaggggcaatttggcactcagattctactctacttcacctaaccacccctagatctgagttttcagagtgcttctgaagtacagtttaaaaacactttttaaaaagtggagtaaaagtgaggcacattttacaagaacataactcctattaaaacggagtaacaactatgcaaaggtttctatagcagctaggtgagtttgttttccgggtctgtcttaactggcagcttcctgtacatactggtacttatttgctgtaaacgtctgtttcatacatttgccatgcagtgactgtgctcgaaaggtgaaatcaatggtaaagaagcctaggattttatggtatgagaaactgatcgcaggattttctgatccatagctattaattgaaaacttctgatagtgctgtaggctctatagtaggcttaagagtgagtcttatactatgaagccagccacaagatactaacaaatgtataaattgaaaagtaccaatactttttgcacatagatcaaaatagagtggagaatttgggctccaaaaatcaggttagtaggctcatttccatgtgcttaaaaatgtttttgttgttatgcattgattaagggctagagcaaatataaaattaaatgtctttttcctccaaaaaaaaaaaaaaaaaaaaaaaa

SEQ ID NO: 27976 - DNA, 4007 bp, Homo Sapiens
cgctggtgtcaggagtattttcatattccaataccgataaatctttgaggtttctgggtgtctctggggagcccctgggccagattttcctctagactccagcccatctcttcagagcagctctgcttgagttcacagatgactgccaagcttcagacaccctacagaaaaagggttgagacccagtgtggccatgccagctaattggacctcacctcagaaatcctcagccctggctccagaggatcatggcagctcctatgagggatcagtgtccttcagggatgtggctatcgatttcagcagagaggaatggcggcacctggacccttctcagagaaacctgtaccgggatgtgatgctggagacctacagccacctgctctcagtaggatatcaagttcctgaagcagaggtggtcatgttggagcaaggaaaggaaccatgggcactgcagggtgagaggccacgtcagagctgcccaggagagaaattatgggaccataatcaatgtagaaaaatcctcagttataaacaagtatcctctcaacctcaaaaaatgtatcctggggagaaagcttatgaatgcgccaaatttgaaaagatattcacccagaagtcacagctcaaagtacacctgaaagttcttgcaggagaaaagctctatgtatgcattgaatgtgggaaggcttttgtacagaagccagaatttattatacaccagaaaacccatatgagagagaaaccctttaaatgcaatgaatgtggaaaatccttttttcaagtgtcgtccctcttcaggcatcagagaattcataccggagagaaactctatgaatgcagccagtgtgggaaaggcttctcttataactcagatctcagtatacatgagaaaattcatactggagagagacaccatgaatgcactgactgtggcaaagcattcacacaaaagtccacactcaagatgcatcagaaaatccatacaggcgagagatcctacatctgtattgaatgcggacaggccttcatccagaagacccatttgattgcacaccgaagaattcatactggagaaaaaccatatgagtgcagtaactgtggcaaatccttcatttccaagtcacaacttcaggtacatcaacgtgttcacacaagagtgaagccctatatatgtaccgaatatgggaaggtcttcagcaataattccaacctcgttacacataagaaagttcaaagtagagagaaatcttccatatgtactgagtgtgggaaggcctttacctacaggtcagagttgattattcatcagagaattcacactggagagaaaccttatgaatgcagtgactgtgggaaagccttcactcagaagtcagcactcacagtgcatcagagaattcatacaggagaaaaatcgtatatatgcatgaaatgtggactggccttcattcagaaggcacacttgattgcacatcaaataattcatactggagagaaacctcataaatgtggtcactgtgggaaattgtttacctccaagtcgcaactccatgttcataaacgaattcacacaggagaaaagccctatatgtgcaataaatgtgggaaggcattcaccaaccggtcaaatctcattacacatcagaaaactcatacaggagagaaatcttatatatgttccaaatgtggaaaggccttcacccagaggtcagacttgattacacatcagagaatccatactggggagaagccttatgaatgcaatacttgtggaaaagccttcactcagaagtcacacctcaatatacatcagaaaattcacactggagagagacagtatgaatgccacgaatgtgggaaagccttcaaccagaaatcaatactcattgttcatcagaaaattcatacaggagagaaaccctatgtatgcactgagtgtggaagagctttcatccgcaagtcaaactttattactcatcaaagaattcatactggagagaagccttatgaatgcagtgactgtgggaagtcctttacctccaagtctcagctcctggtgcatcagccagttcacacaggagagaaaccctatgtgtgtgccgagtgcgggaaggcctttagtggcaggtcaaatctcagtaagcaccagaaaactcataccggagaaaagccctacatttgttctgaatgtgggaagacctttcgacagaagtcagagttgattacacatcacagaattcatactggagagaaaccttatgagtgcagtgactgtgggaagtctttcactaaaaaatcacagctccaagtgcatcagcgaattcacactggagagaagccttacgtgtgtgctgagtgtgggaaggcctttactgacaggtccaatttgaataaacatcagacaacacacactggagacaaaccctacaagtgtggcatctgtgggaaaggcttcgttcagaaatcagtgttcagcatccatcagagcagccacgcttgagagaaacagtgtgagaaaacccccctgagggttgggtctgattgtacactgttgcacgcatgcagcagaaaaatatgtatattattgtaaatagaaatgaccacagcagaatgtcacacatggctgttctggagagggcctctgagaaggcactgaatgaggcgagggacccttcctacattgtcaccatccccagtaaaccttgggtcattattcatactgacaaggaaccgagtcaatttggtgaataggaaaagccttctcatgaaaactacaatagaatactgttaccaaattcttcctaagaaagatcgtattaagttaacgataatcctgtttactgtggattaggtatagtgccaacaaattgaatgataaaacaacataatacgtagttattttgatagtgatgaatcctaagttatgtgagttgttcgttgtggaacacattgtgtaacagactcctgggtgtttttctttctcattcgaatctaccacagttggtcatatccaaccctcattcagtatttctatcaagaaagagatgctacaaaaaaaaaaagaaaaaacctttatgtatacagacgtaaacctcagaatgtatgttgagtccccactgtcatctaccaagacttgcacccccctcattatctaccatgactgtctctcagcctcacgggccctcagcactttgtgttttgacccccagcaccgtgtcttgtgaactcccatcaccttcaagaaagcttccgaggtaagaattttatggtcatctgggacaacttaaatctcccttctgctgtcatagttcttccaactcagttgcctttttttttttttttcgtactcatcactgacttgaagcttagtatctggcttccttaaggatgtaactttcatgtaacagattaataacttatatgaaaaccaacacaaccatatgtttagggctggaaagggccatgacgcctggccatttttcctgttttaccttactcttatgtgtgtcacacttcatcaattccggaaacagtttctggagatctcctcattacctcttttacaatcacctcactccagcatggtgtctgttacctcttcccacttgtgacaatgtctagtaaggtccactctccattctgtgtgatgaccacttattacaaccctcagaataggggacagtggtgtgccccctgcaatacaatggtttctatctcctgatacttttattacacctctagcaggatgtcttgtgatcctccttattgatttttccctcacgatgatgaacaattatctcccgttactcacctagcagtatctaactgtccctaacacagcatgtgggaatgccctcaatacggtggatgctgttaactttcttccttcccctcaggcaatggcggtgacttacaatgaaccataatgtccacatttcccaactgtattttggagcctcttctgtccccttctttctaggaccccagttaaaaaaaaaaaaaaa

SEQ ID NO: 27977 - DNA, 3323 bp, Homo Sapiens
gcgctgtgccggttccgctgccgctggccaggagcgcggggacagttcggggctgcgccggaggccggcccgccttcccgggggttccgttatcatgtcgctgaggcagcgcctggcccagctggttggccgtctgcaggacccgcagaaagtggcccgtttccagcggctgtgcggggtggaagcgccgccgcgccgctcagcagaccggagggaggatgagaaagcggaggcgcctctcgccggagaccctcgactgcgagggcggcagccaggggcgcctggaggcccccagcctcccgggagcgaccgcaatcagtgcccggccaagccggacggcggcggcgcccccaacggcgtgcggaacgggctggcggccgagctgggcccggcctcgccgcggcgcgcgggcgctctgcgccgcaactcgctgacgggcgaggagggccagctggcccgcgtgagcaactggccgctctactgcctgttctgcttcggcacggagctgggcaacgaactcttctacatcctgttcttccccttctggatctggaacctggaccctctggtgggccggaggctcgtggtcatctgggtgctggtcatgtacctgggccagtgcaccaaggacatcatccgctggccgaggcccgcctcgccgcccgtggtcaagttggaggtcttctacaactctgagtacagcatgccctccacccatgccatgtccggcaccgccatccccatttctatggtcctcctcacctatggccgctggcagtaccctcttatatatggactgattcttattccctgctggtgttctctagtttgcctaagtagaatttacatgggaatgcactctattctggatattattgctggattcctatataccattttaatcttagctgtcttctatccatttgtggacctgattgacaacttcaaccaaactcacaaatatgctccattcatcatcatcgggcttcatttagctttggggatcttttctttcactcttgacacctggagcacatcccgaggagacacagccgagatactaggaagtggtgctggaattgcatgtggatctcatgttacttataacatgggtctagtattagatccttctctagatacattacctttagctgggccccccattactgtgactctgtttggaaaagccatattgcggatcctcatagggatggtatttgtactaataatcagagatgtaatgaaaaagatcaccattcctttagcctgcaaaatcttcaatataccgtgtgatgatattcgaaaagcaagacagcacatggaagttgaacttccttatcggtatattacctatggaatggttggtttctccatcacattttttgttccttacatatttttctttattggtatctcttgatggagaagtattgtttatgataagaaaggagggtatcagttactgatacccaaaaatatattccaggtaaagccaggtcagaattaggcttttgcaggaatttaacttaaataattatttaagtaaattcataagagtcagtgcattttatcattgcacatccagatactgttttaggtgagctgagctatttcgttactgagaaaatgataagtatccatttagaatgttcatgtaatgtttggagagttttgtattatggattcaacttatatataatatatataaggtacataatatgcaattatgtatctgatatatattatatataaaataatatacctaagtgtttttttaaactatgggagtgtattataaaatcaataataatatgcaaacagttgtgcctgtgtatttgaactacatacaggtatgttgttattaacagatatatttaacatttatttactatgggagccatttcctaattgaattgcgtaattactagaccagaatgcatatgctactatacattgatttactgcctgtttttacactgccattacctttcatgttatccatgatgttgaacatgggaggcatttttaatggaccaaatttttagaaaaattagtttttggatttttttttaagttctgtatactgttttgaatgaactttatttgcagctattctggatgtcagtttaataattcaggtactgaattttattgcttgctaattgtgcctttccgttgctaaattaagaaatgctatgtgtactgtgatgtaaaaataagacattaactttatcttaagttacatataatcaagcaaatattttaaaaaatgtatgtcagggtgacaggcataaaagtaaattacccttaactctttagcctttatttagaaagaaatgtggaatgggctaaactttctcaccaatttattagaaagctaaatggataaatacttccctttttgtagatatttttctgtgcattgtaagttataggagcaggacatattttttgtacattgtcttgattgtttatactgcaggtaggtatttccagtgaatggaaacgttgaaatttatagatgggacaatgcacatacttcatatgtaaacaaagcatttttctaaataatttggaaaggattggatttagcaccgttaacttttaatacccatttattggctatttaaggtaaattataaaacctaaaattagtatcagtattttagatcctattattttttcaactttctattattttcacagtggaaaatttgcgtatagtattaaactattcttttttctgtctacctttatattttgaagtgtggttgtacttacgttaatagtaagtgtatttgtagaaagtttttcataaagaagagattaactttccatataaataaataccaggtatgaaattactgattttagtgcaatatctgtatgattatccagaactatcacttcagatgtttctattttgggcaccataactatttgagctcatatttttataattctgattgagaatttaggggcatggtaatttttaccaaaactgaagctggtaattttaagtaaagcaactaaatttaccctttacttattagttaaaaggaaaccaaggcatgtaggaaaatattggtacgttggaaaatgtgaaaagagctttactttcaaaatgtatgtttaatgaattgaattttagggaccgtttcccataatttgggcctatgctatcctgttgatttttatgtctagcttaaaaggtatttgaaaatgttccatttgtgttttattattttctgtcctatgacagttctatgctaaatgtattttaaaataaaagccaaattgaagattaaaaaaaaaaaaaaaaa

SEQ ID NO: 27978 - DNA, 2383 bp, Homo Sapiens
tgtcagtaagggaagagatggttacatgggaattggtctttctgctcaaggtgtgaacatgaatagactaccaggttgggataagcattcatatggttaccatggggatgatggacattcgttttgttcttctggaactggacaaccttatggaccaactttcactactggtgatgtcattggctgttgtgttaatcttatcaacaatacctgcttttacaccaagaatggacatagtttagccaaatttgtatcctactgtggggcttcaaacaccaggagaagtggtcgatgccaattttgggcaacatcctttcgtgtttgatatagaagactatatgcgggagtggagaaccaaaatccaggcacagatagatcgatttcctatcggagatcgagaaggagaatggcagaccatgatacaaaaaatggtttcatcttatttagtccaccatgggtactgtgccacagcagaggcctttgccagatctacagaccagaccgttctagaagaattagcttccattaagaatagacaaagaattcagaaattggtattagcaggaagaatgggagaagccattgaaacaacacaacagttatacccaagtttacttgaaagaaatcctaatctccttttcacattaaaagtgcgtcagtttatagaaatggtgaatggtacagatagtgaagtacgatgtttgggaggccgaagtccaaagtctcaagacagttatcctgttagtcctcgaccttttagtagtccaagtatgagccccagccatggaatgaatatccacaatttagcatcaggcaaaggaagcaccgcacatttttcaggttttgaaagttgtagtaatggtgtaatatcaaataaagcacatcaatcatattgccatagtaataaacaccagtcatccaacttgaatgtaccagaactaaacagtataaatatgtcaagatcacagcaagttaataacttcaccagtaatgatgtagacatggaaacagatcactactccaatggagttggagaaacttcatccaatggtttcctaaatggtagctctaaacatgaccacgaaatggaagattgtgacaccgaaatggaagttgattcaagtcagttgagacgccagttgtgtggaggaagtcaggccgccatagaaagaatgatccactttggacgagagctgcaagcaatgagtgaacagctaaggagagactgtggcaagaacactgcaaacaaaaaaatgttgaaggatgcattcagtctactagcatattcagatccctggaacagcccagttggaaatcagcttgacccgattcagagagaacctgtgtgctcagctcttaacagtgcaatattagaaacccacaatctgccaaagcaacctccacttgccctagcaatgggacaggccacacaatgtctaggactgatggctcgatcaggaattggatcctgcgcatttgccacagtggaagactacctacattagctatgcatttcaagagctcacacttatattgtggcatatagtcaacatggaagtagaccagctctgctgatttgaaatttagattttttaaattatgtactggggacaggtttttgtcgctttacattgcttcctagtttacagcatgatgcaaatgattttctaacttagtgttaggagaaattattttccatctttaacctcttagttgtctaagagttaaatattactgaatttcagacgttcaaattgatcatcacaaatcctttaaaacaattacctaaaagaaaccaaaaatcctgccttctttgtgggggaggggggagagaggggaaggaaatggaacaagttgtgtttgtgttagcatgtgggtgatgtaaacttcaaattgggagatgttccgacccccactcccatataagcattcaatcagtgtaacttgcaaaatgcataaacatccgacagtttgaatttatagtgttgatggaagaaatcatttttaatgtgtactgtaaaacttgaaatactcaggagctgagtgaatatgtttgttgctacttacaatcccgacctgttagtcccagtagttttgttttaacatggtctttttcaactttgtttcctgtttaactacagatgacttctgttgtagactcacaagtttaactgttgtattataacagtattacatgtcaacggtgtggttatgacctttatttatataaaaaccaaatatttagtcaatttaccgtgtcttaatttaatctttgtacaccttccatttttaagtgcttaaatgagtactatattgcaataaaatgtagtgatataattaaccagccattaaaaatttacttctacagaaaaaaaaaaaaaaa

SEQ ID NO: 27979 - DNA, 3011 bp, Homo Sapiens
gcagcagctgcggcggcggcggcgtttgagtggaggaagatggcggctccgggcggctcggggtcccgccagctgtgaggagccccgagcacggctgtcgcggcctgaggcagagcgcctctgctctggccctgtccctggctccctcattaccgtcgccagcggagcgaacccgagagcgtggagcgggctgggccagctgttgagtggaatgtcatggccagctcctcagacagtgaagatgacagtttcatggctgtggaccaggaagaaactgtgctggaagggacaatggatcaagatgaggagccccacccagtattggaggctgaggagactagacataataggtccatgtcggagctgccagaagaggttttggagtatatcctgtcctttctctcaccgtatcaggaacacaaaactgcggcccttgtctgcaaacagtggtatcgacttatcaaaggtgtagcccatcagtgttatcatggtttcatgaaggctgtccaggaaggaaacattcagtgggagagccgtacctatccttatcctggaaccccaatcactcagcgcttctcgcacagtgcatgctattatgatgctaatcagtctatgtatgtgtttggaggctgtacccagagcagctgcaatgctgctttcaatgacctctggagacttgacctaaacagcaaagagtggatccgacctttggcttcagggtcctatccttcccccaaagctggagcaactctggtcgtgtacaaggacttgctagtgctgtttggtggctggacgcggccaagcccttatcccctacaccagccagagagattctttgatgaaatacacacttactcaccctctaaaaattggtggaactgcattgtgacaacccatgggccacctcccatggctggccactcctcctgtgtgatagatgataaaatgattgtctttggtggctctttaggatcccggcaaatgagcaatgatgtctgggtccttgaccttgagcagtgggcgtggtccaagccgaacatctctggccccagtcctcatcctcgaggtggccaatctcagattgtcatagatgatgcaactatcttaatcctcggagggtgtggcggtcccaatgctctattcaaggatgcttggttgttgcacatgcattctggtccttgggcctggcagccactcaaggtagaaaatgaagagcatggggccccagaactgtggtgccatccagcttgccgggtgggacagtgtgtggtggtcttcagccaggctcctagtgggagagccccactcagccccagtttgaactctcgcccatcacctatcagtgccactcctccagctctcgttcctgaaacccgagagtaccgctctcagtctccagtaagaagcatggatgaagctccttgtgttaacggccgctggggaacactgagacccagggctcaaaggcagactccttcaggttcccgggaagggagcctttccccagccagaggagacggctctcctatcctcaatggtgggagtttgtctccaggaacggcagctgtgggtggctcttctttggacagtcctgtacaggccatatctccaagtactccatctgctcctgaaggatacgacctgaaaataggactttctttggccccccgacgaggatcactaccagatcagaaagatctgagattaggatccatagatctgaattgggatctgaaacccgcttccagtagtaatcccatggatggcatggacaataggacagttgggggaagtatgagacaccctcctgaacagacaaatggtgtgcataccccacctcacgtggccagtgcccttgcaggggccgtctccccaggtgccctgcgtcggagtctggaagccatcaaagcgatgtcctccaaaggcccctcggcctctgcagcactaagtcctcctcttgggtcttctccaggctctcctgggagccagagtttgagcagtggagaaacagtgcccatccctcgcccagggcctgcccaaggagatggacattccttacctcccattgctcgccgcctgggccaccaccctccacagtccctaaatgttggcaaacccctataccagagtatgaactgcaagcccatgcagatgtacgtgctggacattaaagacaccaaggagaaggggcgggtcaaatggaaagtatttaatagcagttctgtggttggacctcctgaaaccagcctgcataccgtggtacaaggcaggggtgaactcatcatatttggaggactcatggacaagaaacagaatgtgaagtactatccaaaaacaaacgccttgtactttgtacgagcaaagagataatgtgttctaaacccctttccttttctgtggcttttaatttggaattttccagtgtgtaagcatttggactgagaattgggaaaacaaaattactcccagaagccaaaactctttaattcccaaccgaagtcactccaggctgggatcaaatctccattaagaaaaaaaattatatataaatatatatatatatattatatagccaactctgttgacaaaaaaagggagagatttccatcctggttcagataaagttgttgctgtgttttaacaggggctgggctgcctttttctaccttgctggtaactagaccaagaagttagagaatagactaacatcagtaacttcccaaaagaaactgaagagccccctgtaaatctttatgtggccttcttggagttaaaaaatgaaagggcatatgtaagttgcaaaggtggagggttttagactctcatgcttcaggtgctgtcggggtaaaagtaactgtttttccccttctcttaaaaccacagaggacctgtgacagctctgcagaaatgccagtgcctggccccctcttgccttttatggctgaggaaagttacccaacaaaggattttattccaaaaaaaaaaaaaaaaaaaaaaaaaaaaaaaaaaaa

SEQ ID NO: 27980 - DNA, 5303 bp, Homo Sapiens
aaactacgggcactcagaaatagacaaactgttcttgcctcaaccgaaccaaaggcccagcgggcctcgaaaaagctcagccaggtgctttgggaggccgcgaggaggaagaaggatccgtggaaggaagcacgttcacaccacggcactgaggcctctgggccgagctataatttaaagcatgaaacgaaggggtcatagattctgactaatgctgaccatttccatcggttacccagttgaatctcatgtcgacactaggaaatcgactttatacatgctctttaggaaacgagggacgcaggatgaaagaagccaagagtgtcgccagggcttgcgccagcgccgtcagactcccgggatgggggagctccagggcacggcgtcagcggattcacggagaaggagaaaagccccactgccgtgcagaagcctaggcccgggtgagacgcctgcgaaggctgccagcagcggaagagaaggggcgtcctccgtgctgcgcagcactcgcccgcggtaggtgggcgcggagctcagagctgggagccaaacgcaaacgctggcgagaagccccagccccctccgccagcccactcgctgcggggaggggtttctcacgcccccagctcctgggagactgcaccggaggtcggaagtaagccgggcgaggatgaatcatcccgcctaactcctccttcccggtcccctagcctccgcacgccggcccccttcagagatcttgcagccgcgagcgaagactgccctatcctcagactctaccgaaccccctgtggcctgcggagacgaggagacggacgggtctggtggccaatgagagcttcgatctcttgccccccgcccaatgggccgctgctcatgggccggggcgggactaggagggcaggtaggggcggtccgggctggcgcgcggcgcggcggctacgcggctgcggctcacagagctagcgcctctctgggtgtccgtgccagtgctgcgcgggaaggcaccaccaccacagccgccgccgctggccagggtgctggacaagacgggcccgtcggccacctcgccagctcaggcacccgctgcagccgtcgctgtctcctcccagaccggtccccatggaggagatggaagaggagttgaaatgccccgtgtgcggctccttctatcgggagcccatcatcctgccctgctctcacaatttgtgtcaggcgtgcgcccgcaacatcctggtgcagaccccagagtctgaatccccccagagccatcgggccgcgggctccggggtctccgactatgactatctggacctggacaagatgagcctatacagcgaggcggacagcggctatggctcctacggggggttcgccagcgcccccactaccccgtgccagaagtcccccaacggcgtccgcgtgtttcccccggctatgccgccaccggccacccacttgtcaccggccctggccccggtgccccgcaactcctgtatcacctgcccccagtgtcaccgcagcctcatcctggatgaccgggggctccgcggcttccccaagaatcgcgtactggaaggggtaattgaccgctaccagcagagcaaagccgcggccctcaagtgccagctctgcgagaaggcgcccaaggaagccaccgtcatgtgcgaacagtgcgatgtcttctactgcgatccgtgccgcctgcgctgccacccgccccgggggcccctagccaagcaccgcctggtgcccccggcccagggtcgtgtgagccggaggctgagcccacgcaaggtctccacctgcacagaccacgagctggagaaccacagcatgtactgcgtgcaatgcaagatgcccgtgtgctaccagtgcttggaggagggcaaacactccagccacgaagtcaaggctctgggggccatgtggaaactacataagagccagctctcccaggcgctgaacggactgtcagacagggccaaagaagccaaggagtttctggtacagctgcgcaacatggtccagcagatccaggagaacagtgtggagtttgaagcctgtctggtggcccaatgtgatgccctcatcgatgccctcaacagaagaaaagcccagctgctggcccgcgtcaacaaggagcatgagcacaagctgaaggtggttcgagatcagatctctcactgcacagtgaaattgcgccagaccacaggtctcatggagtactgcttggaggtgattaaggaaaatgatcctagtggttttttgcagatttctgacgccctcataagaagagtgcacctgactgaggatcagtggggtaaaggcacactcactccaaggatgaccacggactttgacttgagtctggacaacagccctctgctgcaatccatccaccagctggatttcgtgcaagtgaaagcttcctctccagtcccagcaacccctatcctacagctggaggaatgttgtacccacaacaacagcgctacgttgtcctggaaacagccacctctgtccacggtgcccgccgatggatacattctggagctggatgatggcaacggtggtcaattccgggaggtgtatgtggggaaggagacaatgtgcactgtggatggtcttcacttcaacagcacatacaacgctcgggtcaaggccttcaacaaaacaggagtcagcccgtacagcaagaccctggtcctccaaacgtctgaggtggcctggtttgctttcgaccctggctcggcgcactcggacatcatcctctccaatgacaacctgacagtgacctgtagtagctatgatgaccgggtggtgctagggaagactggcttctccaagggcatccactactgggagctcacggtagatcgctatgacaaccaccctgatcctgcctttggtgtggctcgcatggacgtgatgaaggatgtgatgttaggaaaagacgacaaagcttgggcaatgtatgtggacaataaccggagctggttcatgcacaacaactcgcacaccaacagaactgagggagggatcacaaaaggggccacaattggggtcctcctcgacttcaatagaaaaaacttgacattttttatcaacgatgaacaacaaggtcccatagcatttgataacgtggagggcctcttcttccctgcggtcagcctgaacaggaacgtgcaggtcacgctgcacaccgggctcccagtccccgacttctactccagcagagcatcaatagcctaaggatgtgccgtggaggcgccagctgcctgttcttacctccgcctgcgagagccacagcaaggagctcagccagccgtggtggggtgcagagttggcaggagtgggagaaggaggagagaaaagctggtcctctgcagtctttacacccacagctctgcccttttccctttcaacctctcctccgctgtcatgcctgcttccgcttccatgtccaacaattctaaccaacaaaggacctagacagcccaccaagtcacttggttcccactcccagattttgcttttatttaacttaattttttatgtaggtgagttatattttctttcttttctgatcaggttattggtgacttactggactggcaccgccaggagaaaattctcctgctaactttttttcttaagctttctgtcaaacaatgaggttgtagggggaggtagggaagaatgagctgaatttgtagcatacagcttacctgctagaatgttcttaccctcttacctctcctgtagcgttagctctgcagagctaagctttgggagaatgaatctatcactgagaagttttactactcattgaagcacaaaaatatccgctacacaggttcacatcagggtaggatcgttaggatggctctataattaggacaggccagaaccctggccactgtataaaattggaaagtctctaagacacaggcaaaccaggggacttaatgatttggttcgtttatttaataaaagcttttaattgagaacctactattgaccaggcactgttcaagacactagaacattatgttctagacactgtggggacacagtggtgaacagacaggcatggtctctgcccttcggagcttatattccagtaggagaaaaagcaaaaataaaataattataaatggtcatatgtactagaaaggaaatgggcaagggtcaaagagactcatgggcaagatctttcaggcttcctagaatgatgctaaaaatccacacattctggccatagcaccagaaatgtaccaactcaatgccttttcagctgcactatttaattatggtacctgctgccactcatcacagagcccttcttggtagaaatgatgtcagcattcttatttgctgatgctgctatgataccacgccttaaaaattgacagttgaaaaaaaaaagagtgaccagagggcaaaggacccattctcagtaatgggagatcttgagttgcagtccacagcattcacattctcaggataaacatgcttgtctccatatatactatctgtgcctgttatgaatgaaaaatccatccactctgctgccattcacagcctaattttctggagtagtccaaacaatgtttggaaaaacatgggactgtatgtcattactatgactgatagcagaataataatgcatcttacttctatatagagatagacttacataggttacccttgaaattcattagtttgtcataaagttttaggaaaggtaggacccggaaagaagttctaattagttgtctaaatatttttcagtgagccaagaaattcaccatgaaaaaacaagaataacaaatagaagggaagagataggatgggaaagctaacaaattaaagttttggcaaaaaggaatatatgtaaatagctaattatttacttttgtgcttactttatttagattatttctatcagttacaatctttttctagttaagtgtacctaatttatggaatgggtgctatcctgtttatgtgtgtcttggtttttcttggctacagaaaaactgttgcagggcaacactagtttgatatttgatttactctccaatgagactcaatggctgggccgtggtagactcatagttcctcttgttctttattaaattcatcctgctaattagatttctagtgacttgtaacatgtagtttacactgaattgcaattacagatgcatacaactactatactagaaaaaattgtcatttctgatgtgccaataaatgatttttatgagagaataaaaaaaaaaaaaaaaaaaaaa

SEQ ID NO: 27981 - DNA, 5319 bp, Homo Sapiens
ctgatttcgtgcgcttcctcgtccttcatgttggatggccagtttttcgtttgtgcgtcatcctctacctgagaaatggtcgcttgcccctagtctagacacgcattaaagggcagtatttaaagtcagttggcaagcagtggaataagatttttgtaaagaaaccttgtgcagcatggattctctaccagatgaattttttgtgaggcatcctgctgtggaggatcagaggaaggaagaaactgagaataagctagaaaaatcatctggtcaactgaacaaacaggaaaatgacatacctactgatcttgtccctgttaacctactattagaagtgaagaagttattaaatgcaattaatactctaccaaaaggtgtggttcctcacattaagaagttcttacaagaagatttttccttccaaactatgcagagagaagttgcagctaacagccagaatggtgaggaaattgttcctgctttgactttacgtttcttgattacacagctagaagcagcacttaggaacattcaagctggcaattataccgcacaccagattaatattggttattatttgacattactgtttttatatggagtagcactcactgaaagaggaaagaaagaggattatacagaagctgagaataaatttctggtgatgaagatgatgatccaagaaaatgaaatttgtgaaaactttatgtctttagtttattttggacgtggtttactgcgatgtgctcaaaagagatataatggaggactgctagaatttcataaaagcttacaagaaattggagacaaaaatgaccattggtttgacatagatcctacagaagatgaagatttacctacaacttttaaagatcttcttaataattttatcaagacaactgaaagcaatataatgaagcagacgatttgtagttacctagattgtgaacgatcttgtgaagctgacattttgaagaacaccagttataagggattttttcagttaatgtgcagtaaaagttgctgtgtttatttccataaaatttgctggaaaaagttcaagaatttaaagtatccaggtgaaaatgatcagagttttagtgggaaaaaatgtttgaaggaaggatgtacaggtgacatggtaaggatgctgcaatgtgatgtacctggaattgttaaaattttgtttgaagttgtgagaaaggatgaatatatcaccattgaaaatttaggagcaagttatagaaagttgatatctctgaaaataactgatactgatataagaccgaagatcagtttaaaatttaatacaaaagatgaaatgcctatcttcaagcttgattataattatttctatcatctgcttcatataattattatttctggtactgacattgttcgacaaatatttgatgaggctatgccacctcctcttttgaaaaaagagcttcttatacacaagaatgtgctggaatcctactacaaccatctttggaccaatcatcctttgggtggatcatggcatctgctttatcctcctaacaaggagttaccgcaatccaaacagtttgacttatgcctcctgttagctcttataaaacatttaaatgtgttccctgcacccaaaaaaggatggaatatggaaccgccatcttctgacatctctaaatctgcagacatcctgagactgtgcaaatacagggatatcctccttagtgagattttgatgaatggtctcactgagtcacagttcaattcaatttggaaaaaagtttcagatattcttctgcgccttgggatgatgcaagaggatattgacaaagtgaaggagaatcccattgagaatatctcccttgattaccatcagctatctgtctacctaggcataccagtaccagaaatcatacagaggatgttatcctgctatcaacaaggaattgctctacagtcaataacaggcagtcagcgtattgaaatagaagagttacagaatgaggaagaagaactaagtccacctctcatggagtacaatataaatgtgaaatcacaccctgagatacagtttgcagaaattaataaagatgggacctcaatacccagtgaatcttcaacagaatctcttaaagatctccaggaagttaagagtaaacaaaggaaaaagaagaagactaagaataaaaagaataaagactcaaaagaagaccaagtcccatatgtggtagaaaaggaagagcagttgaggaaagaacaagcaaatccacactcagtcagtagacttataaaagatgatgcaagtgatgttcaagaggattctgcaatggaagacaagttctatagcctggatgaattgcatattctggacatgatagagcagggctcagctggcaaagtaactacagactatggagaaactgaaaaggaaaggcttgctcgtcaaaggcagctttataaattgcactatcagtgtgaagatttcaaaagacagttgagaacagtgacttttcggtggcaagaaaaccaaatgcagattaaaaagaaagacaaaattatcgcatctcttaatcaacaagttgcttttggaatcaataaggtttccaaattacagcgtcaaatccatgctaaagataatgaaatcaagaaccttaaagagcaactttctatgaaaagatctcagtgggaaatggaaaaacataatctggaaagcacaatgaaaacatacgtaagcaaactgaacgcagaaactagcagagctttaacagccgaggtgtatttcttacagtgtcgtagggattttggtttgcttcatctagagcagactgaaaaggaatgtctcaatcagcttgccagggtgactcacatggcagcaagcaacctagaatcacttcaattaaaggctgcggtagacagttggaatgccattgtggcagatgttagaaacaagattgcattcctcaggacacagtacaatgaacaaataaacaaagtcaagcaaggatttgccttgagtaccttgcctccagtccagcttcctcctccaccacccagtcctgagatactgatgcagcagttcttaggaagaccccttgtgaaagaatctttctttagacccatacttactgttcctcaaatgcctgcagtttgcccgggagtcgtctctgcaactggccaacctagagcccccctgatgactggcatagcctgggctctgccagcgcctgtgggagacgctgtgcctcccagtgcaggtctgcggagtgatccctccatcatgaattgggagagaattacagacaggctgaaaactgcctttccacagcaaaccagaaaggaacttacagatttcttacggaaattgaaggatgcttatggaaaatccttgtctgaactgacatttgatgaaattgtttgcaagatttcccagtttattgaccccaaaaagtctcagagtcaaggaaaatcagtgtcaaatgttaattgtgtttcacctagtcattctccatcacagcctgatgctgcccagcccccaaaaccagcctggaggccactcacttcacagggtcctgccacatgggaaggagccagtaatccagatgaggaagaggaagaagaagagccttgtgtgatctgtcatgagaatctgtctccagaaaatctttcagttttgccttgcgctcacaaattccatgctcagtgcattagaccatggttgatgcaacaggggacatgtccaacgtgcagactccacgttttgctaccagaagaattccctggtcaccccagccggcagttgcccaagatctgatacaaggtacccatgaagagattatgaactacttgaaggtggagactgtacggtggtgtgttggagctggcttgtaatgtcttatgagtgacaatcgttagtttgaggaattttgtgagacagttgtcaaattgttgctagcttgaaatctgcggcaattggagtatttacaccatagaaatgctataagtgaagacctacctttcccttaagagctagttgttaaacctttaccagcataccactggaccttgtctaaaatttctttgtgttcccagtgtcttgcccagtagatacaagataaatattgccagaatcagatcaggaagtagtaagaaaaggagttaatatgcaaactaaatcactcgctcaattgaataattgagatcttctgttcatttgttccttggaccttaatcatttgcattttggagaaaattttttctgctttaaaagtctgtaatttcagtttttgtgtcggggagagggaaaaactatttgtctgtagttgctttttgtgacaaagtgaatacccactgggctaagtttcatatctaaagcttgtcactaagaattttcatttttaggggtcaaaaacctattttgaaaatagtgttgtgtgaatgctgtaagtgttgtacatgtctctggtttcagaattaaaagaattcagagttaccttgtgagataaatgttctttgcttcatattcacagtttcacctccatttaaatttatggggaagaataaatgtttcctgactcagaaacaattttgcctccatatttcagtgcaaatatattttgaagttacttttaaatatttatttaaaacctctgtttctgtaactgtatgttaaacgtattcttctgtaatgagaatagactggaacatgtgagggaaaaatattaaaaaaaagatggcagtcatctagacatgtaaaatgccaagaatgtcttagaattgcacaatttagaatttatagagcctttaatcaccttgtctagcaccttgtattagtccattttcatgctgctgataaagacatacctgagattgggcaatttacaaaagaaagaggtttaatggacttacagttccacatgactaaggaggcctcacaatcatggtggaaggcaaagaggagcaagtcacatcttacatggatggcagcagacaaggagagagagcttgtgcagggaaactcccatttttaaaaccatcagatctcatgaggcttactatcacgagaacagcatgggaaagacctgcccccgtgattaaattatttcccaccaggcccctcccacaacatggaataatgggagatacaagatatttgggtggagacacagagccaaaccatatcacaccttaaggtcatggtcatatagctagttatcttgtaaaaccaatgtttcttagttcatacttacaactgcaatttcactttcatttagaaaagaataaatgtttcttaattgaacaactaaaaaaaaaaaaaaaaaaaaaaaaaaa

SEQ ID NO: 27982 - DNA, 2239 bp, Homo Sapiens
ggaggtggtagagtgcagcttcaacatttgtgtggtctctttgctcaagccagatggcatgttccaccccacatggaagtaacagaagactacccagaaaatgtcatttctctctacctacaaggactccaacactctgcacctccctacggagcgtttctcccctgtgcgccggttctcagatggggctgcgagcatccaggccttcaaagctcacctggaaaaaatgggcaacaacagcagcatcaaacagctgcagcaggagtgtgagcagctgcagaagatgtacggggggcagattgatgaaagaaccctggagaagacccagcagcagcatatgttataccagcaggagcagcaccatcaaattctccagcaacaaattcaagactctatctgtcctcctcagccatctccacctcttcaggctgcatgtgaaaatcagccagccctccttacccatcagctccagaggggctgcatcttcttcccagtttcaaggcttaccttcccgcagtgcaatctttcagcagcaacctgagaactgttcctctcctcccaacgtggcactaacctgcttgggtatgcagcagcctgctcagtcacagcaggtcaccatccaagtccaagagcctgttgacatgctcagcaacatgccaggcacagctgcaggctccagtgggcgcggcatctccatcagccccagtgctggtcagatgcagatgcagcaccgtaccaacctgatggccaccctcagctatgggcaccgtcccttgtccaagcagctgagtgctgacagtgcagaggctcacagtgcacatcagcagccgccacactataccacgtcggcactacagcaggccctgctgtctcccacgccgccagactatacaagacaccagcaggtaccccacatccttcaaggactgctttctccccggcattcgctcaccggccactcggacatccggctgcccccaacagagtttgcacagctcattaaaaggcagcagcaacaacggcagcagcagcagcaacagcagcaacagcaagaataccaggaactgttcaggcacatgaaccaaggggatgcggggagtctggctcccagccttgggggacagagcatgacagagcgccaggctttatcttatcaaaatgctgactcttatcaccatcacaccagcccccagcatctgctacaaatcagggcacaagaatgtgtctcacaggcttcctcacccaccccgccccacgggtatgctcaccagccggcactgatgcattcagagagcatggaggaggactgctcgtgtgagggggccaaggatggcttccaagacagtaagagttcaagtacattgaccaaaggttgccatgacagccctctgctcttgagtaccggtggacctggggaccctgaatctttgctaggaactgtgagtcatgcccaagaattggggatacatccctatggtcatcagccaactgctgcattcagtaaaaataaggtgcccagcagagagcctgtcatagggaactgcatggatagaagttctccaggacaagcagtggagctgccggatcacaatgggctcgggtacccagcacgcccctccgtccatgagcaccacaggccccgggccctccagagacaccacacgatccagaacagcgacgatgcttatgtacagctggataacttgccaggaatgagtctcgtggctgggaaagcacttagctctgcccggatgtcggatgcagttctcagtcagtcttcgctcatgggcagccagcagtttcaggatggggaaaatgaggaatgtggggcaagcctgggaggtcatgagcacccagacctgagtgatggcagccagcatttaaactcctcttgctatccatctacgtgtattacagacattctgctcagctacaagcaccccgaagtctccttcagcatggagcaggcaggcgtgtaacaagaaacagagagttttgtgtacagcttgggaatgaaaaggttgattgtaaacccacagtatctagcagcgttgtgccaaattgcccttgtgtttctctccacccaaaatatcacagctgctttcctcacatttggttcatccgtgtgctgttcttttgggttctgagagggttttgccatgtttgcttgtatgaccaagtcaccaaggaaataaacaggaaggaaatccaaaaaaaaaaaaaaaaaaaaaaaaaaaaa

SEQ ID NO: 27983 - DNA, 1809 bp, Homo Sapiens
aggttacttacgtgttcagaggcaccagctaaggagcaaaagtcaactttgaattctgtgttttgactactgcacagctctatttgcctcattttttatttttaaagcagcaaatcttagaataggagtttaaatccatcacttggagaaaagaaagactaaatgttttttgtttttgttttggagacacgatcttgctttgtcacccaggctggagtgcagtggcacaatctcggctcactgcagcctcgatctcctggactcaagcgatcctctcatctcagcctcctgagtagctgacactacaggcatgtgccaccatgccaagcttattttattttatttttttgatagacactggggtttcgctatgttgcctgggctggttttgaattcctggcctcaagcgatccacccgtctctgccttccaaaatgctgtgattacaggcgtgaaccactgtgcatggccaaaagagtaaacttgaaatctgaggcgaatgacttgattgtgacatcaggtgacctagtaatcagctgtgtattctagctggtgcctctaccagcttcccatgtgaccttgaacatgtcattgaatgctcgctaggcctctgtttctttatctgtgaaatgggcttgatattcctcctctaccccaaccgatagtgcagaatgaaaagtaactgaaagtccttcctccagggcaccatagtgtctgggtgaaaagtagaatataaactcggtagacttctggtcccttcattggtcatggaatggaccagtgcttgcttcattgagcaacagttctgttgttcagaattcctggatttcacctcacttctgctctccctgcaggtgaatgtgatgttcatgcttgccattcttctgacattcttccacccctttctggtatatcgggaatgccgtacttggaaagaaagtccctctgcaattgcatagttcagaagccctcacttttcagccccgaggatggttttgttcatcttccaccacctttgaggacctcgtgtcccaaaagactttgcctatcccagcaaaacacacacacacacacacacacacacaaaataaagacacacaaggacgtctgcgcagcaagaaaagaatctcagttgccaagcagattgatatcacacagactcaaagcaaaggcatgtggaacttctttatttcaaaacagaagtgtctccttgcacttagccttggcagacccttgactccaggggagatgacctgggggaggaagtgtgtcaactatttctttaggcctgtttggctccgaagcctatatgtgcctggatcctctgccacgggttaaattttcaggtgaagagtgaggttgtcatggcctcagctatgcttcctggctctccctcaagagtgcagccttggctagagaactcacagctctgggaaaaagaggagcagacagggttccctgggcccagtctcagcccagccactgatgctggatgaccttggcctgaccctggtctggtctcagaatcacttttcccatctgtaaaattgagatgaattttggtgttgaaagttcttcctggagcagatgtcctagaaggttttaggaatagtgacagagtcaggccaccccaagggccatgggagccagctgacctgcttgaccgaaggatttctgacagactatctttggggatgttttcaagaagggatataagttatttactttgggcatttaaaagaaaatttctctcgggaataattttatagaaaaataaagcttctgtgtctaaggcaaaaaaaaaaaaaaa

SEQ ID NO: 27984 - DNA, 1760 bp, Homo Sapiens
ggcgcgcaggcctgccatgagggaaagccaggatgccgccggagctcatggctggaaccgcgtcggctccacggccaccaagtggttcaccggggcgcccttcggggtgcagagccacaggtttgacatctctgctgtttatcccaactggaagaagttcagcaccttcactgaggccccatactccacgcgttattctacccaagtgtcccacataggccctgggacttacagctccaaagagacctgcttcagcaagaagaagctgatgaaggaggtggacacaggctgggccaaggcccaggaagccacgcggctgacccagctaccccacttccagtaccaggccatcatgaaagagaagcggctgaaggagcaaaagctgggcccctgctcctacaacctcaaagacttcttagaacagctgcgggagaaaccatgtagcacccgggggctgctcagctctggggaggttcgcttccgaggactcactgggaactactatccaggccctggaaattatggggagaagggtaacccatacaccaagctggaggagaatgcctggaaccggtctcattccgagggcctcatgtgcaggatgagcaacaagccacacccccggcctcatcaggggagtggtctgggacccggcacctacttcttcaaaagcgaccttgagacatatgtggcacgatccgtcggcacccgcggcccctatgacactttctctggtgatcggagcaagccactgccttatgggcactactccatgcagaaaaaaaagcccagggaactgatgaatttcaagagctttgtagaagaacttaactcacatcacaataagaagcatggggttttttctaaacttccccgaaacccgaaaacccctacagagaggatttactgggccaacctcagccagtgcccccgcacactggccacatctggccccagtttctggcttccacaagagaagaaatgcaaacccgtcaaccagcccccattcctgttgacctccaaggggtcaggtgcaaaggcctgccagatgattatgggaagctggaacccagtaggtgtgggccgctacctcaacacctggctgatggagacaaaggacaggcggcagcgatatcgatccctattcctgagtggatccaaacgctacctctcagacctggcccgggacatgctcatgcaaatcaggctgttttgttggaaaggcctagaagtcatcaattttggcctctcaccaatgtaggatctcctgtgaagcagaaccaacagggaaaggatcacaccatttactaagggaaagtgccctccaactgtggattacaattcagatcctactccttaaagccacatgcgaaggacagcctgcagtgaccagagagcccaaaggcctgaagacaaatctgggggtgacagcatgggcatgggagtggggtgtcttagagaaaggacacatgggcttgggagaggggagagatgtatggggatcacctttgccagagctgcatacctgaaggtcacagtgtcttccgggacagctggggacaggtatcttttgttgcaggagatcaattatcctgagaactcaactcagccagtgacatgaacatgggggccagagagcagatggactgaagggatgggacgtagttgacacttgtgggaccctttctattctaaagccagagtgcttggctccttgtttattaaagttcagaaagtggtgggaaaaaaaaaaaaaaaaa

SEQ ID NO: 27985 - DNA, 1971 bp, Homo Sapiens
cgccgctgccgcggggacatggtcctctgcgttcagggacctcgtcctttgctggctgtggagcggactgggcagcggcccctgtgggccccgtccctggaactgcccaagccagtcatgcagcccttgcctgctggggccttcctcgaggaggtggcagagggtaccccagcccagacagagagtgagccaaaggtgctggacccagaggaggatctgctgtgcatagccaagaccttctcctaccttcgggaatctggctggtattggggttccattacggccagcgaggcccgacaacacctgcagaagatgccagaaggcacgttcttagtacgtgacagcacgcaccccagctacctgttcacgctgtcagtgaaaaccactcgtggccccaccaatgtacgcattgagtatgccgactccagcttccgtctggactccaactgcttgtccaggccacgcatcctggcctttccggatgtggtcagccttgtgcagcactatgtggcctcctgcactgctgatacccgaagcgacagccccgatcctgctcccaccccggccctgcctatgcctaaggaggatgcgcctagtgacccagcactgcctgctcctccaccagccactgctgtacacctaaaactggtgcagccctttgtacgcagaagcagtgcccgcagcctgcaacacctgtgccgccttgtcatcaaccgtctggtggccgacgtggactgcctgccactgccccggcgcatggccgactacctccgacagtaccccttccagctctgactgtacggggcaatctgcccaccctcacccagtcgcaccctggaggggacatcagccccagctggacttgggcccccactgtccctcctccaggcatcctggtgcctgcatacctctggcagctggcccaggaagagccagcaagagcaaggcatgggagaggggaggtgtcacacaacttggaggtaaatgcccccaggccgcatgtggcttcattatactgagccatgtgtcagaggatggggagacaggcaggaccttgtctcacctgtgggctgggcccagacctccactcgcttgcctgccctggccacctgaactgtatgggcactctcagccctggtttttcaatccccagggtcgggtaggacccctactggcagccagcctctgtttctgggaggatgacatgcagaggaactgagatcgacagtgactagtgaccccttgttgaggggtaagccaggctaggggactgcacaattatacactatttatttatttattctccttggggttggtgtcaggggcgagccaaccccacctctatgccctgagccctggtagtccagagaccccaactctgccctggcttctctggttcttccctgtggaaagcccatcctgagacatcttgctggaaccaaggcaatcctggatgtcctggtactgacccacccgtctgtgaatgtgtccactctcttctgcccccagccatatttggggaggatggacaactacaataggtaagaaaatgcagccggagcctcagtccccagcagagcctgtgtctcaccccctcacaggacagagctgtatctgcatagagctggtctcactgtggcgcaggccccggggggagtgcctgtgctgtcaggaagagggggtgctggtttgagggccaccactgcagttctgctaggtctgcttcctgcccaggaaggtgcctgcacatgagaggagagaaatacacgtctgataagacttcatgaaataataattatagcaaagaacagtttggtggtcttttctcttccactgatttttctgtaatgacattatacctttattacctctttattttattacctctataataaaatgatacctttcatgtaaaaaaaaaaaaaaaaaaaaaaaaaaaaaaaaaaaaaaaaaaaaaaaaaaaaaaaaaaa

SEQ ID NO: 27986 - DNA, 2882 bp, Homo Sapiens
gagcgctgcgggataaaggaggagcgtcctgcttcccggctgccctgttgctgtcggagtcacaggatggcggctgtcatcctgccctcgactgctgctccgtcttccctgttcccagcctctcagcaaaaaggacacacacagggcggagagctggttaatgagctcctgacaagctggctacggggcttggtaaccttcgaggatgtggccgtggagttcacccaggaggagtgggcgttgctggaccctgcccaaaggacactgtacagggatgtgatgctggagaactgcaggaacctggcctcactagggtgtcgtgttaataaacccagtctgatatcccagttggaacaagacaagaaggtggtgacagaggaaagaggaattctaccaagcacctgtccagatttggagactctacttaaagccaaatggttaactcctaagaagaatgttttcagaaaagaacagtctaaaggtgtaaaaacggaaagaagtcatcgtggagtgaaactcaatgaatgtaatcagtgttttaaagtcttcagcacgaaatctaacctaactcagcacaagagaattcatactggagaaaaaccctatgactgtagtcaatgtgggaagtccttcagtagcagatcttaccttactattcataagagaatccataatggggagaaaccctatgaatgcaatcactgtgggaaagcatttagtgatccctcatcccttagactgcatttgagaattcacactggagaaaaaccctatgaatgtaaccagtgttttcacgttttccgcaccagttgtaacctcaaaagccacaagaggattcacacgggggagaatcaccatgaatgtaatcagtgtggaaaagctttcagcacaaggtcctctctcactgggcacaatagcattcatacaggggagaaaccttatgaatgtcacgattgtgggaaaaccttcaggaagagctcctatctgacacagcacgtaagaactcatactggagaaaaaccctatgaatgtaacgagtgtgggaaatccttcagcagtagcttttctcttactgtgcacaagagaatacataccggagagaaaccctacgagtgcagtgactgtggaaaagcctttaataatctctcagctgtgaagaaacacttaagaactcacactggagaaaaaccctatgaatgtaatcattgtgggaaatccttcacaagtaactcctatctttctgtgcacaagagaatacataatagatggatatgaattactgcaggaacttctggaggaaagcactcattgatctttcatccctaagatagtttgagagagctcacactggatatataagttatttgttgcagcataacaaatgatccccgcaaattttgtggcttcaaacacgaaatgtttattctctaacaatttctacagatcaggaattcaagaacagcttatctctgtagttacactgcaggatctctcatgcctttacttacaatcaagatgtcagccaaagctatagtcatctaacatctttactgatgaacagtccacttccaagatgacttattcacatgcctggaaagttgatgttggttgttgtcaggggaccttcagtcattaccatgtaggcctctttacaaggcccagctccttgacaatttggcaataagttctcgccaaggttagtgatccaagagaggaccaatacagaggccaaaatggcttttatgacctatcctcaggaggactgctaagctttcacttatttcctattgtgttggtctcacaacacaccaatcctgatacaatgtgagagactgcagaaggtatgaataccaggaaacagataactcagaagcatctgggaaatttgccatggaattaatgaagaaaagccctcagcacatcatccttctactctaatcaatatgaaatagcattcagtaactcctattaattcactctgaagagaaaccttttgaggacaatctgtatggtaaagctctcagctcgaattctcaccttcatgggcccagaagattatgtactgagagaatcctgaagaatggaacagctgtagaaagccttcagtgctatcagcagggattcatgtgacagctcacactaagggagaaaacctgtgaaggtctcagaaggcttcagtgacagtcatcccttaagacacactggaaatcacacaatggaacaacactcagaaatgcggaataccctacagcaaaagtgttcacattactgagcaaactatagtgtggtattctgcagtgactatgggaaagccttgaatgttctatcggtttttaagggacttgagaattaattctggagagaatgccccattgaacatcatcaatattggagagctttctgtttttctacatttgttaggaaacttgtgagcattcacactacagagaaacttgaaatataaagaagaagagaaagccttcagtgatgcctctgtgttagggaaaatatggaacttctccctggatgcaaaacctatgagtatattaatattggaaaatttttcagtgattcttctctttcttgtatatgagagaacttatatggagaaacccctaggaatgtaatcagtgttaggatgcctcagcctgaactcttcactgagtggccacaattttcactgggaacaaaaagtataatcactgttttgagtgtgggatatcctttatcagtgtctcatctgtagattggactgctggctcattaatttttttagtctttttttcttttaatataaacatttgtgtatagctgttccctaaaataaacattaacatatttcataattttaaaaaaaaaaaaaaaaaaaaaaaaaaaaaaaa

SEQ ID NO: 27987 - DNA, 3690 bp, Homo Sapiens
ctcagggctccagtcaggccgatccgctccgctcacggaaggaaaacagaaataacttgctggcttgtctggagtcacatggtgacaatttacagaaagtcatctctgcagcttgatgggcgacaacccttttcaaccaaaaagtaattcaaaaatggcagaactgtttatggaatgtgaagaagaggagctggaaccatggcagaagaaagtaaaagaagttgaggatgacgatgatgatgagccaatctttgttggcgagatatcaagttcaaaaccagcaatttcaaatattttgaacagagttaaccccagctcatattcaaggggactaaagaatggtgcactcagtcgaggtattactgctgcattcaagcctacaagtcaacactacacgaatccaacatcaaatccagtgcctgcctcaccaataaattttcatcctgagtctagatcttcagatagttctgttattgttcagcctttttctaaacctgtaagtgtttctaaaactatacggccagctcagggatccattggatgttgtttatcaatatcaacagtacccagttacaattctggactgtcataagtagtcatccagtagaagcatagttagcatcagaaaatgtcaccatattttcgctagctcaagcagtaccccaagtaataactgaaggagctaactacccaacctgttaataacaggcagtatgcctaaataggtacagtaatgaaaactatactatcaaaatgtgaataaaattatagtcagccataaatattgcataatgacaaatatttaagattgcagacgggaccaggtattcttaattgggaaaacagtcaagtgaccatcatagctttttattctgaaaacattccttcatagttcagttagttaaaaaaaaacaaacattttttcctattacaaaaaactcccactttttttgttacaaaaagtaatagaaaatggtaatagttaacattcattgagctgttaatatgtataagtgtttgtgctaaatgctataggtaaattcatttcatttagttcttaaacatccccatgaagtaaacactattattatcctcattttttagttgaggaaactgaggctcatagaggttgaaagatttattcaagatcccaaagctggcagttgatggatctgggatttcaatccagcctaacccatagtttatatgtatatgcacacatacatacatatatgttgtgtataaatgtacacttttttagacatgaaagaattgccttagttgaacagttctcagattgtagtttgcaatcccctggggttccccaagaccctttcagaggtttgagggtcaacagtgttgtcattataatcaaagactgttttccttttccactgtgttggcatttgcactggtgatgctaaagtaatggtggataagctgctggtgccttagtgtgaatcaaggtagtgccaccaaagtgtacttgtagtttctgtattagtcacctgccgtgcactcacagtaaactacattactcaactgagtattacccagttatacccaatccctgatgaagtattaaaatgttattagttttattaactctctacacttgaatgtgtgttttttaaaatattctgtgtgatgacatgggtagtgtgcataaagtacctctgtgtctgaagtatgatagttgtcttgaggaaaagcacttgtgtgattgaattgtgaggtaaactacctgatttttttttgttgttacatgaaagaatgactgacaaatctttaaagtatttacaatatcactccagaaaagaaaacaaatcaaataaatattgactcaaaactctccaagtacatatcaaaatctcaggaagggaaaaaagagtctaaagaacaaaatataacactattttatttcagtcatgttagttcagtttccacagtttgaactgggtatagattaatatctaaaaccaaaaaatgaacatgtgtatagtgatgctgaaaaatgtgcattattttttatttatattttaggaataataaagttagttattaaagaatttagtgattttgattgagtgagaggtgtgagctatatttgcttctttcctgtatgatatacatacattgtttccaatctcatttctattaaataactataggagagcccacagccttgttattttacatatcactatttagatatttgttatttatttatttgtgttggcctgaagtaaatgttacttttgtacgatatttgaaggatagatttattttataaattaatagtttaaataagattttgccagcatttgaaatgatatttatttctgtgtatcaatattaccacaaacttaacacagcttaaaacaacatacactctttatctcatgatctcacaatttctgtgggtcaggaatcaggtcatggcttaggtgggttttctgcttaaggatctcacaaggctgcattcaagatgtggtgcctgaagttgcagtttcatctgaaattctgttggggaagtatttgcttccaagttcacatggttgttggtagcattcagttccttaagggatgttggactgagaatctctgtatcttgttggcttttggctggctccttgccacgtagttcttcccaataaggctgcttgcttcctcaaagctagcaggtgagagtgagtccttagcaagatgcccttacagtcttaggtaacataatcacgtacacaaaaatcatatatatcctgtcacctttgttgtgttctattggttaaaagcaagtcagaggtcctgcccacactcaatgggagggaattacacaggacctgaataccaggacctggggattatgggtaatgacatttacatggaggccactttagagtctgtctgccacacacgcttagtcaatcttgattgtttggcaaacatttcctcaaatctgtcacttcagcaaaaataattgatagtaatatttcttaccaatggtaaaatttgaacttttaagcaaaaattagaattttggaaaactcatttgccaccgtgatcttggcagcttttgaataagagttttctgatgggtggtggtgttcataaataatgatttttaaaatattgtgtaatgaattatgtcaccatttggaagacctgtgtaattcagtgaaactagtattttccacataactagtatatatactacaaaagtatgcatgggtaaaacatacatttaaaagctaagatagaccaatgattttaatggaacgggtgttctgggatacggtttcagatttcacactgcaacaaacctttaagaaagtaccaactgttcagttttggtatagtatcaaagtagtatatccacagttaattaaaaccctattaaaacactcccttttccagttatatattcctgtgaggcagaatttaataatactcctcaaccaaaacaacatgtcatagtagactgaaggcagaagcagataagagactaaaacaatttttgattaagctagatatttaagagctttgcaaagatgtgaaacaatgccacttttcactagttttttttgcgtttgcaagtcatttttcattaaaatgttatttatgttaatttgtaatgagtttgttattttaaaatgaataaataaatattataaaataaaaaaaaaaaaaaaa

SEQ ID NO: 27988 - DNA, 5277 bp, Homo Sapiens
gttgtcagtggccgagagaccgcatcgtcggctcggaggctgaggggctgccgcggccgggagcgcccctcgcctcgctcctcgctccgcttggtgtcatgtgattctctgagggagcagctgcgtgagtggagatgctttcagtggtggagaatggactggacccccaggctgccatcccggtcatcaagaagaagctggtgggatccgtgaaggccttgcagaagcagtacgtgtccctggacacggtggtcactagtgaagacggagatgccaacaccatgtgcagcgccctggaggccgtatttatccatggcctgcacgccaagcacatccgagctgaggccggaggaaaaaggaagaaaagtgcccaccagaagcctctgccccagcctgtcttctggcccctcctgaaagctgtcacccacaaacacatcatctcagagttggagcacctgacgtttgtcaacacggatgtgggccgctgccgggcatggctgcggctggccctgaacgatggcctgatggagtgctacctgaagctgctgctgcaggagcaggcccgcttgcatgagtactaccagcccaccgccctgctccgggatgctgaggagggcgagttcctccttagcttcctgcagggcctcacgtccttgtccttcgaactctcctacaagtctgccatcttaaatgagtggacgctcaccccattggccctgtctgggctttgcccgctttctgagctggaccctctctctacctctggtgcagaactacagcggaaggaatctctggattccatttcccattcttcaggctctgaagacatcgaagtccatcactcgggccataagatacggaggaaccagaagctgactgcctcctccctcagcctggacacggccagttcatcccagctgtcctgcagcctaaactctgatagctgcttactccaagagaatggctccaagagtccagaccattgcgaggagcccatgtcctgtgactcagacctgggcacagcaaatgctgaggactcagaccggtctctgcaagaggtattgttggaattcagcaaagcccaggtaaactctgtgccaaccaacggactgagccaagaaacagagatccccacaccacaggcctcgctctccctccatggcctcaacaccagcacatacctgcactgtgaggcacctgcagagccccttcctgcccaggcagcctctggaactcaagatggtgtccacgtgcaggagccgcgtccccaggcgcccagccccctggacttacagcagcctgtagagagcacctcaggccagcagccttctagtactgtcagcgagacagccagagaagtgggccaagggaatggcctgcagaaggcccaggctcatgacggagctggtctgaagctggtagtttcctcacccaccagtccgaaaaacaagagctggatctcagaggatgacttctaccggccttcccgggagcaacccctggagagtgcttcagaccacccaatagcttcttacagggggactccagggtcaaggcctggtctccacaggcatttttctcaagaaccaagaaaaaactgctccctgggggcgttagaccaagcgtgtgtaccttccccaggaagaaggcaagcccaggcagccccatcccaggggcataagagcttccgggtggtacaccggagacagatgggactgtccaacccattccggggtctcatgaagctgggcaccgtggagcggcggggggcaatgggcatctggaaggagctcttctgcgagctctccccgctggagttccgcctctacctgagcaacgaggagcacacctgtgtggagaactgctcgctgcttcgctgtgagtctgtggggccagcccatagtgatgggcgctttgagctggtcttctctggcaagaagctggccctgcgcgcctcctcccaggacgaagctgaggactggctggaccgggtgcgggaggccctgcagaaggtccggcctcagcaggaggatgagtgggtgaacgtgcagtacccagaccagcctgaggaaccccccgaggcgccccagggctgcctctctccctcagacctgctctcggagcccgcggccctccagggcacacagtttgactggtcgtccgcccaggttccagagccagatgccatcaaggagtccctgctgtacttgtacatggacaggacctggatgccctatatattttctctgtccttggaggctctgaaatgtttccgcatcaggaacaatgagaagatgctgagtgacagccacggcgtggagaccatccgggacatcctgccagacaccagccttgggggcccatccttcttcaaaatcatcacggccaaggctgtcctgaagctgcaggccggaaacgccgaggaagccgccctgtggagggatctggtccgcaaagtcctggcatcctacttggagacagccgaggaggcggtgaccctgggcgggagcctggatgaaaactgtcaggaggtgctgaaatttgccacccgggagaatggcttcctgctgcagtacctggtggctatccccatggagaaaggccttgactcccaaggctgcttctgcgcaggctgctcccggcagatcggcttctcctttgtacgacccaagctctgtgccttctctggcctctattactgtgacatctgccaccaagacgatgcctcagtgattccggccaggatcatccacaactgggacctcaccaagcgcccgatctgcaggcaggccctgaagtttctgacacagatccgggcccagcccctcatcaacctgcagatggtgaacgcgtctctgtacgagcatgtggagcggatgcacctcattgggaggagacgggagcagctgaagctcctgggggattacctgggcctgtgccggagtggcgccctgaaggagctcagcaagaggctcaaccacaggaattatctcttggaatctccgcataggttcagtgttgctgacctccaacagatcgcagacggggtgtatgaaggattcctcaaggccctgattgaatttgcctcccagcatgtctaccactgcgacctgtgcacccagcgcggcttcatctgccagatctgccagcaccacgacatcatcttcccctttgagtttgacaccacagtcaggtgtgccgagtgcaagaccgtcttccaccagagctgccaggctgtggtgaagaagggctgcccccgctgtgcccgccggcgcaagtaccaggaacagaacattttcgcctgatgcccatctgctgaccccgctctgaaagccgggggtgagtgtggctcagccatcccggctgggtttgccatcagcccaggatactcaccgtgtcacagctgtgtccccttgtcaggaagaccctcagatgtggccagagcaccggcctcccagagaaagcccaggaagtccccgtggtgtcccctggccctccccccacccctctgctgcaggaggcgtggccaccaccagatgctccctgtctggggcaggcagggccgtttactcaccaggccctggctcaccagcgtcccggcgcctccgttagggctgcccaaacactgtggaaaggggacttggggagcattttcaattccacattcctgattaaaaggtctagttttttaaggtgggtttttcccattcatatttcaacagaaagtatttttttattcttgaccctacgtgagtcacccatgaaatccagacattctcacccccagcggatgcacaggagccactcaggcctggcttagaggtagcgggtggctggtgggcaggccactgctgggacagggtctatgggcccacccagtgcctttccttggccctcactgccagtgccaaaccgcccctcagcagggcagggccagtcctggcgaccccggttcctctgtgtcctctttactccccaccccagtgcgtctcgcctgctgagcccaccgctttctcagcgtcagagcccctagctcttctctagcctggggccttggccccattaggagaaggagaaatgactggaaaccagcactgtcagcactttgagccctcctcggtttatggagggtcgccgtcttgcccacccccgatccccgtgcgctcctcacccctctacagacaggggcgctgctgcagatgctccaggcccaccttggtgggtgcccggggtcacactctctgcctgactgacccctgccagggcacagataggcaggaccccagagagggcaggcagccacgccctgcactgtggagaagtgacctggtcctaagctgtgcagggcgtgcgggggaactgccctgtggatgcagccaccacctcacaaagccatgaattcccaaagcatcactgaacttgcccagccgggacactggagactgaagaagttccccggagcaggactgcctttgaaggggccttggggctggggtgggagtctggaattgttttcaaagtgatggtcagaccctccaggcttcggggaaatgtgggtttgctggtctctctgtcgccttcccccacctctcctggacctagcaggccctcagtcctagctgtcttacctgcgctcagcttggagtcaggcctcaggtggagagccgcatgtcactgtcagagatgagcccacccccacccttccctgggggcgattagctgctgagtcacccacccagccttggagctggatgcctgtgcagcagaacagaggcaacggtggcaggcaggtggaggctgcgcacagcttctcccggtcatggcacacacctgtgcccagacgccaatgcctcctaagccaggagctgggttatgcaccgccatggcccacattaacgctccaccacaagcccagcctagtcagagccctcattgccccatccctgagtgggcaggagcctggcctggggagggcttgggcctgtgaggattctccccgaaggtgccctcggaggcagcaggtttgaggccctggggggcccgttccccagaagctgccagtgctttcagatgcattgactcttcccgcctcccctccctcagaaaggtagtgcccacactatttttaaaatgttattttatgcaatacactgttcctagtgagcagggctctggccctgaggagtctttgcaatgtattgaaggaattgctgccgtgtgagttttgaatgattttgcagtaaagacctgatctttctcatcaaaaaaaaaaaaaaa

SEQ ID NO: 27989 - DNA, 2799 bp, Homo Sapiens
ggtcaatggggacggggcgacgccactgatgctagcagctgttacggggcagctggctctggtgcagctgctggtggagaggcacgcggatgttgacaagcaggacagcgtgcatggctggacggccctcatgcaggcaacctaccatgggaataaggaaattgtgaaatatctgctaaaccaaggggccgatgtcactcttcgtgcaaaaaatggatacacggcctttgacctggtgatgctgctgaatgatcccgacacggaacttgttcgactgctggcatctgtctgcatgcaggtgaataaagacaaaggccggccgagccaccagcctcccctgccccactcgaaggtccgacagccctggagcatcccagtgctgcccgatgacaagggtggactgaagtcctggtggaaccgaatgtccaatcggttccgaaagctcaaactgatgcagacgctgccccgtgggctgtccagcaaccagcctttgcctttctctgacgagcctgagccagctctggactccacaatgagggctgccccccaggacaagacaagccgctctgcactccctgatgcggcccctgtgaccaaagacaatggtcctgggagcacaagaggagaaaaggaagacacgttattgacaaccatgcttcgaaacggagctcccctcaccagactcccgagtgacaagctgaaagcagtcatccccccattcctacccccttccagttttgagctgtggagctctgatcggtcccggacgcgtcacaacgggaaggcagaccccatgaagactgcgctgccccagagagccagcaggggccaccccgtgggcggcgggggcacagacactacacccgtcaggcctgttaaatttccaagcctccccagaagcccagcctcttctgccaattctggaaacttcaaccactcgcctcattcatcgggcggctccagtgggataggtgtgagccggcacggtggggagctgcttaaccgctcaggtggcagcatagacaatgtcttgtcccaaatcgctgcccagaggaaaaaagcagccggattattggagcagaaacccagccatcggtcaagccctgtggggccagcaccggggtccagcccgtctgagcttccagcctcccctgcaggtggcagcgctcctgttggcaagaaattggagaccagcaaaaggcctccatctggaacttccactacctccaagagcacctctccaaccctcacgccctccccctcacccaaagggcacactgcagagtcctcagtgtcttcctcgtcatcccatcggcagtccaagagcagtgggggctccagcagtggcaccatcacagatgaggatgaactgactggaatccttaagaaattatcacttgagaaatatcagcccatttttgaggaacaagaggtggacatggaagcgttcctcacactgactgacggtgacttgaaggagctgggaattaagacagatgggtccaggcagcagattctggcagcgatttctgaactgaacgcaggcaagggacgcgagagacaaattttacaggaaaccattcacaactttcactcttcctttgagagcagtgccagcaacaccagggcccctggcaacagcccctgtgcgtgatcctccttcccgcagccaccagcgtgagctctctgaatcccgggaccccttcacgtggccacagccccagccctgcccccgtcacactgctgtgccttagtcatgttgttccctttgctcgggatgcccacttcacgtcgacggcattcattggtagtacttcttgctgcaacaaacttcaacacacagagacagattcccatgtaacagtccagtgggggtgcttctgcttggcacgttggttcacacagtgatgcagggactcagctcctttcatcctgtgctctgccctccccgggagcctcagagtttgcttctggctggcggcaagggaaagggacgatggagaaggcacggctgcttcttacctgccttgctcttaactgacacacatcactcctgctcacgtcctcttggccactggtagtcatgtggccccacctggatgcagaggaggccaggatgtgcagtctccacatagtggcttcccagcaacaacttttgacttagatggggggtatgtattatggtgagaggttagccttcctggcacatcttcccttaaaacttctaacttgcccctcctagtccaagtcacctctcagatgaagtcttttttgaccccctttcagccactgggtcccttagtgctgtgtatgtgactgctgtagcattccactgcacctgctgcatacagcttacattggagatgtgtatgtcaaacgcatttttctttattgcaaagagagtctattatagaaggaaagaagtggaggcctgctgtgtggatcccttcttcttcctagctttcagtttccttatctgcaaagtggaaggtcagaccagatgatgctctggtactccacagtgctcacctgtatcactgcagggctttctgcactgaaagtggaagcagaaggctaatgggtcacattgtgtaaaggtctctggtgctcaaagtttctaggcaaagaagtgaaaatttggaattttgtctacatcctattaatgctgtgttcctcaaaagggaattggcttgtgtagtttcctaccatatcatattttattaaattagaggggccctgacttttaaaacccaaaaaaaaaaaaaaaaaaaaaaaaaaaaaaaaaaaaaaaaaaaaaaa

SEQ ID NO: 27990 - DNA, 5623 bp, Homo Sapiens
gaaactccggcgcaggagtcccgggctgccgctggcaacatcgtgtcacccagctaagaaaatccgcgggcccgagccacgcgcctgtgaatcggagaggtcccactgcccgagtggagccgggctgagattcttctcaagttgagcctcagtgatcctgtggccgaagttagcgccttgacgtgggacaaccggacacgtcgccaggacagaactgaggcgccttctagcagttgtgacgccaaaatcacgtctccggagacccgcgccctccgccagccgggcgcaccctcgccggtagccttctttgtgcgccgtccggactcccagctcccggcccggcagccgagccccagcacaaagcagtcggaccgcgccgcccgcctcccctctcgcgtctccgcctcggtttcccaactctgcgccgtcgggccgcggcaggatgattgcctcgcatctgcttgcctacttcttcacggagctcaaccatgaccaagtgcagaaggttgaccagtatctctaccacatgcgcctctctgatgagaccctcttggagatctctaagcggttccgcaaggagatggagaaagggcttggagccaccactcaccctactgcagcagtgaagatgctgcccacctttgtgaggtccactccagatgggacagaacacggagagttcctggctctggatcttggagggaccaacttccgtgtgctttgggtgaaagtaacggacaatgggctccagaaggtggagatggagaatcagatctatgccatccctgaggacatcatgcgaggcagtggcacccagctgtttgaccacattgccgaatgcctggctaacttcatggataagctacaaatcaaagacaagaagctcccactgggttttaccttctcgttcccctgccaccagactaaactagacgagagtttcctggtctcatggaccaagggattcaagtccagtggagtggaaggcagagacgttgtggctctgatccggaaggccatccagaggagaggggactttgatatcgacattgtggctgtggtgaatgacacagttgggaccatgatgacctgtggttatgatgaccacaactgtgagattggtctcattgtgggcacgggcagcaacgcctgctacatggaagagatgcgccacatcgacatggtggaaggcgatgaggggcggatgtgtatcaatatggagtggggggccttcggggacgatggctcgctcaacgacattcgcactgagtttgaccaggagattgacatgggctcactgaacccgggaaagcaactgtttgagaagatgatcagtgggatgtacatgggggagctggtgaggcttatcctggtgaagatggccaaggaggagctgctctttggggggaagctcagcccagagcttctcaacaccggtcgctttgagaccaaagacatctcagacattgaaggggagaaggatggcatccggaaggcccgtgaggtcctgatgcggttgggcctggacccgactcaggaggactgcgtggccactcaccggatctgccagatcgtgtccacacgctccgccagcctgtgcgcagccaccctggccgccgtgctgcagcgcatcaaggagaacaaaggcgaggagcggctgcgctctactattggggtcgacggttccgtctacaagaaacacccccattttgccaagcgtctacataagaccgtgcggcggctggtgcccggctgcgatgtccgcttcctccgctccgaggatggcagtggcaaaggtgcagccatggtgacagcagtggcttaccggctggccgatcaacaccgtgcccgccagaagacattagagcatctgcagctgagccatgaccagctgctggaggtcaagaggaggatgaaggtagaaatggagcgaggtctgagcaaggagactcatgccagtgcccccgtcaagatgctgcccacctacgtgtgtgctaccccggacggcacagagaaaggggacttcttggccttggaccttggaggaacaaatttccgggtcctgctggtccgtgttcggaatgggaagtggggtggagtggagatgcacaacaagatctacgccatcccgcaggaggtcatgcacggcaccggggacgagctctttgaccacattgtccagtgcatcgcggacttcctcgagtacatgggcatgaagggcgtgtccctgcctctgggttttaccttctccttcccctgccagcagaacagcctggacgagagcatcctcctcaagtggacaaaaggcttcaaggcatctggctgcgagggcgaggacgtggtgaccctgctgaaggaagcgatccaccggcgagaggagtttgacctggatgtggttgctgtggtgaacgacacagtcggaactatgatgacctgtggctttgaagaccctcactgtgaagttggcctcattgttggcacgggcagcaatgcctgctacatggaggagatgcgcaacgtggaactggtggaaggagaagaggggcggatgtgtgtgaacatggaatggggggccttcggggacaatggatgcctagatgacttccgcacagaatttgatgtggctgtggatgagctttcactcaaccccggcaagcagaggttcgagaaaatgatcagtggaatgtacctgggtgagattgtccgtaacattctcatcgatttcaccaagcgtggactactcttccgaggccgcatctcagagcggctcaagacaaggggcatctttgaaaccaagttcttgtctcagattgagagtgactgcctggccctgctgcaagtccgagccatcctgcaacacttagggcttgagagcacctgtgacgacagcatcattgttaaggaggtgtgcactgtggtggcccggcgggcagcccagctctgtggcgcaggcatggccgctgtggtggacaggatacgagaaaaccgtgggctggacgctctcaaagtgacagtgggtgtggatgggaccctctacaagctacatcctcactttgccaaagtcatgcatgagacagtgaaggacctggctccgaaatgtgatgtgtctttcctgcagtcagaggatggcagcgggaagggggcggcgctcatcactgctgtggcctgccgcatccgtgaggctggacagcgatagaacccctgaaatcggaagggacttcctctttctctccttcttccctgttttaaattataagatgtcatccccttgtgtcagagacagaccccttggcttttgcttggcagagaggaccccactggactgggttttgtctctgcatctcattgtagagcttggtggctgagcttggccctattaagataaatagagttccaaataaggatttgttcacatgcatcataaccattcccattggttctcctaaaacatgaaaattatctcccttagtaatcccccttgccaaattccatgtccctgtataattctacaggatggggacactaatgaagatacggttgcttcaccttggagcctgaacatgacatttctaagtggggtgcatcccccagcactgatgttgttactgattctcctgtcagagatctgggaggtctccactgaggatgtgagcctgattatcctataggcagacgtggggagggtggaggggtgacagtggaggaaaatccatggatatccacgcagcagcccctctttaacctcatctacaagcatttgccctgtggattccagcatttgccattcctggaatcaaggaatcctgagtctgggcaatgaaaccaaagccaggagttgacgcatcctgcagttgggccagctgtcgcatctcagcggggcgcacatgttatccacaagcaatggacctttggggaagggggagtttttagtttgttttacaaatttttcctgcaaaagtggaatcactgtattttcattttaatttatatttgaaattttatttagttcttgagcatctgcttcttcatcttgacatgtaatgaatggtcagttgtacgtaatgtatttatatgttaatttgttatgtatatagatgtgcaagtcttgtcagaattggcctcagtgtagttaaagggcagaaggggaagatactgactagtcatagaaatacctcattcgcctgtgggaagagaagggaagcctcttcagggtgagtgaatggcaaagcggttgcttctggctcctccttcccctgtggtcttggaagtgtgtggaaggcagggacagagatggaggccgagccaatagactgaagagaccacagcaattggctcctccatctagagattttcttggcagtattccatgggatgttaagcaaaggaaaccaaaggaatcgtttcaaatggactcatggcttagaaatctttattcttagggcagtcagtagtattctaaagctttctgacaagataaaggaagtcaccaaaatttctttttttaaattgtatctaatcctcaacaacaaaccaaaacagaacaattaaacagccaaataaaacctcagggacaacatttttggtgtatttgagccctcccagcaagtttcaccttgggtttgtattttaaatgttttacaagaattgtccatgtgcttccctaggctgagctggcattggtctgctgacctgtttttgtgtttttcttttttttatacacaacatttatttcaaactattgggagggatgagagtggcttaaaaacttccatccctacttttcaagagtgcagttgattctgaatctgaaagcccgcctctgtcctaaaatacaaacaagcacagacattaaacctggatactatatgataaagagggatgtaactattgaattggatacaaggatcagaatggaaagaaactcacgatgaaattgaacctggtttttgtatatttatcaaacttgtgctgagaatagtgtctgattatacgacttttaagcaaagttgggtgtaattaggtgaaaacagcccaggtcctcccgggagcacagaggggctaggggctggtccttctcgtttgctctagtcttgctttgctgtctggtgtagctcctctgctgctcccatctgcactaattgacccaaaacgtgggtatttcctgctacacaaaagccaaaaggtttcatgtagattttagttcactaaagggtgcccacaaaatagagattaattttaacttaaattttaagcttgaagattaggtactatctgtgaagttacacttttttttttttttttaaaggtagagatgtgtgtgtgtgtaggtattaaagatgtgttgttggtttccaaaaaggaacactggaaaataaattttgaatgtttatgttctcagaatcaggttgacagtcccttgctgacatggctttgctttgtgtaaatacagtggatctcaatcttcggggtgtgatgaatagcgaatcatctcaaatccttgagcactcagtctagtgaagatgttgtcattatgtacaatacataactagtttaattaactatgtgatgttaactattattaataaattttaacattttccaaaataaaaaaaaaaaaaaaaaa

SEQ ID NO: 27991 - DNA, 2577 bp, Homo Sapiens
gtgaggaggcgactgactgagcagcgcacccggggagcaaggaggcgcggtgaactgagcggcccctgagctgacagatacactgcgcagctggaacggcgagcgagccgacgggcgagtgaggggcgcagccatgatcacctcggccgctggaattatttctcttctggatgaagatgaaccacagcttaaggaatttgcactacacaaattgaatgcagttgttaatgacttctgggcagaaatttccgagtccgtagacaaaatagaggttttatacgaagatgaaggtttccggagtcggcagtttgcagccttagtggcatctaaagtattttatcacctgggggcttttgaggagtctctgaattatgctcttggagcaggggacctcttcaatgtcaatgataactctgaatatgtggaaactattatagcaaaatgcattgatcactacaccaaacaatgtgtggaaaatgcagatttgcctgaaggagaaaaaaaaccaattgaccagagattggaaggcatcgtaaataaaatgttccagcgatgtctagatgatcacaagtataaacaggctattggcattgctctggagacacgaagactggacgtctttgaaaagaccatactggagtcgaatgatgtcccaggaatgttagcttatagccttaagctctgcatgtctttaatgcagaataaacagtttcggaataaagtactaagagttctagttaaaatctacatgaacttggagaaacctgatttcatcaatgtttgtcagtgcttaattttcttagatgatcctcaggctgtgagtgatatcttagagaaactggtaaaggaagacaacctcctgatggcatatcagatttgttttgatttgtatgaaagtgctagccagcagtttttgtcatctgtaatccagaatcttcgaactgttggcacccctattgcttctgtgcctggatccactaatacgggtactgttccgggatcagagaaagacagtgactcgatggaaacagaagaaaagacaagcagtgcatttgtaggaaagacaccagaagccagtccagagcctaaggaccagactttgaaaatgattaaaattttaagtggtgaaatggctattgagttacatctgcagttcttaatacgaaacaataatacagacctcatgattctaaaaaacacaaaggatgcagtacggaattctgtatgtcatactgcaaccgttatagcaaactcttttatgcactgtgggacaaccagtgaccagtttcttagagataatttggaatggttagccagagccactaactgggcaaaatttactgctacagccagtttgggtgtaattcataagggtcatgaaaaagaagcattacagttaatggcaacataccttcccaaggatacttctccaggatcagcctatcaggaaggtggaggtctctatgcactaggtcttattcatgccaatcatggtggtgatataattgactatctgcttaatcagcttaagaacgccagcaatgatatcgttagacacggtggcagtctgggccttggtttggcagccatgggaactgcacgtcaagatgtttatgatttgctaaaaacaaacctttatcaggatgatgcagtaacaggggaagcagctggcctggccctaggtttggttatgttgggctctaaaaatgctcaggctattgaggacatggttggttatgcacaagaaactcaacatgagaagattctgcgtggtcttgcagttggcatagctttagtaatgtatgggaggatggaagaggctgatgctctcattgaatctctctgtcgtgacaaggacccaattcttcgaaggtctggaatgtatactgtagccatggcttattgtggctctggtaacaacaaagcaattcgacgcctgctacatgttgctgtaagtgatgttaatgatgatgtcaggagggcagcagtagaatcacttgggttcattctattcagaacccctgaacagtgcccaagtgttgtctctttgttgtcagagagttacaaccctcatgtgcgctacggagctgcaatggccttggggatatgctgtgctggtacaggaaacaaggaagccattaatttgctagaaccaatgacaaacgaccccgtgaactacgtgaggcaaggggcactcatagcttcagctctcatcatgatccagcagactgaaatcacttgtccaaaggtgaatcagttcagacagctgtattccaaagtcatcaatgataagcatgatgatgtcatggccaagtttggcgctattctggcccagggcatactggatgcaggtggtcataatgtcacaatctccttgcagtccaggactgggcatactcatatgccttctgtggttggcgtccttgtatttacccagttttggttctggtttcctctttcacacttcctgtcattggcttatacccctacctgtgtcattggccttaacaaggacttaaaggtttctactgctgtattatctataactgccaaggctaaaaaaaaaaaaaaaaaaaa

SEQ ID NO: 27992 - DNA, 2708 bp, Homo Sapiens
agctgttagcagcatctgccccaatttcagctgaagattcaggtgccccagggactggaagaaattacagtgcctacttggaaagaagaagagatagcgacttgccccagtccaaccccagagcgggtacctgctgtcactgactcctgaattcattctcgctgtgtgtctacttttgcttttttggagctgtggctaaaggaagtggaggggccgtgggatgcggagagccgagggctaactcccggacagcggaacagagagagctgccgacaaacagacggcggaggagccgtcacctcccagaatgactagtgccgcccctgctaagaaaccctaccgtaaggcaccaccagagcatcgggagctgcgtttggaaattcctggatcccggcttgagcaggaggaacccctgactgatgcagaaaggatgaagctcttacaggaggagaatgaagagcttcgccggcgcctggcctccgccaccagacgcactgaggccctggaacgtgagctggaaattgggcaggactgcctggagctggagctgggccagagccgcgaggagctggacaaatttaaggataagttccgcaggctgcagaacagctacacggcttcccagcggaccaaccaggagttggaggacaagctgcacacactgatcaagaaggctgagatggataggaagacgctggactgggagattgtggagctgaccaacaagctgctggatgccaagaacaccatcaacaagctggaagagctcaatgagcggtaccggctggactgcaacctggctgtacagctcctcaagtgcaacaagtcccacttccgaaaccacaagtttgccgatctgccctgtgagctacaggacatggttcggaaacatttgcacagtggtcaagaggccgccagcccaggtcctgctcccagcctagccccaggggctgtggtgcctacctcagtcattgcccgagtgttagagaagccggagtctctactgctcaattcagcccagtcaggcagcgccgggcgccccttggctgaggatgtctttgtgcatgtggacatgagtgagggtgtcccaggtgatccagccagtcccccggcccctggcagccccaccccacaacccaatggggagtgccactctctgggtactgccaggggctccccggaggaagagctgcccctgccagcctttgagaagctgaacccctacccaaccccgtctccaccacacccactgtatcctggccgcagggtaatagagttctctgaggataaggttcggatcccccgcaacagccccctgcccaactgcacttacgctacccgccaggccatttccctgagcctggtagaggaggggagtgagcgggcccgccccagcccagtgcccagcacccctgcctcagcccaggcctcaccccaccaccagcccagcccagcacccctaacactcagtgccccagctagctctgccagctctgaagaggacctgctggtcagctggcagcgggcatttgtggaccgtactccaccacctgctgctgtggcccagcgcacagcctttggacgcgatgccctccctgagctgcagcgccattttgcccatagccccgctgacagagatgaggtggtccaggcaccttctgcccgacccgaagagagtgagcttttgctacccacagaacctgactctggctttcccagggaggaagaagagctgaacctgcctatcagtcctgaggaagagcgccagagcctgctgcccattaacaggggcacagaggaggggccaggcacttcccacaccgagggcagggcctggccactccccagctccagtcgcccccagcgcagccccaagaggatgggggttcaccacctgcaccgcaaggacagcctgacccaggcccaggagcagggcaacctgctcaactagggcccctgctggccttcctgccattgctgcaccaggactgcaaggagtccccacaccttggcagctcagggtccccagtccaagcccttgacctctcctctatccagacccgcacagctgtttcctgtgtggatggggtcaggttgtgggccatgccaggcctgtcagctgcgttgactgactgcagcagcttgcctcatggttttccctttttcttagaatatttattcttcagaggtaacatgcagttgggtctcaagacctttcctccaatcagcccaacccagcccagactgggcttttctggggagctgaggagtttatcagtattcatcttccatcctttcatagtcacaagttttgttattttgtttttttttgggggtgatggtgtaattgttaacctcatttccgtttcctacctgtttgcttccccccccagtcctccgcatgagctgttgccctccaggggcctggcacagctggccttggggacgagggagaggactgattcagggccccctcagctgtctcctccctccctctggaaaggagggtggggctcaggggcctcaagctgggctctgtgtgaggcctggcccccactcccaaccttggctctagactgttactcttaagctttgagaaattttcacattgatgactattttaaaatcaaataaaactattttactggtaaaaaaaaaaaaaaaaaaaaaaaaaaaaaaaaaaaaaaaaaaaaaaaaaaaaaaaaaaa

SEQ ID NO: 27993 - DNA, 2842 bp, Homo Sapiens
ggcgagttcacccgcggcggagggtaactttgctgtgctgttttttgagcagttgtctggtccctggaagtgtagcatcgagagagttttctaattacgtttacaaaatatcttccctttggccatacaagtggtgactgccatgtcgaactcgcggcccaggtcccgccgagacgccgggggtggcgctggggcagccggccgggacgagctggtgtcgcggtccttgcagagcgcagagcactgtctgggcgtccaggacttcggcactgcctatgcccactacctcctcgtgctcagcctggcgccggagctgaaacacgacgtgaaggaaacttttcagtacacacttttcagatgggctgaagagcttgatgctctcagtcggatacaagacttacttggttgctatgagcaggccttggaactgtttcctgatgatgaagtgatttgcaatagtatgggggagcatctcttcagaatgggctttagggatgaagcagctgggtattttcataaagcagtgaagctaaaccctgatttcagtgatgcaaaggagaatttttatcgtgttgcaaactggttggtggaacgctggcactttatcatgcttaatgacaccaagaggaatacaatttataatgcagcaatccaaaaggcagtttgtttggggtccaaaagtgttttggacattggagcaggaactggaatactaagcatgtttgctaaaaaagctggagcacattccgtgtatgcctgtgagttatccaagaccatgtatgaacttgcctgtgatgtcgtggcagcaaacaagatggaagcagggatcaaactcttacatacgaagtcacttgacatagagattccaaaacatattcccgaaagagtgtccctagttgtaacagaaactgtcgatgcaggtttatttggagaaggaattgtggagagtttgattcatgcatgggagcatttacttttacagccaaagaccaaaggtgaaagtgctaattgtgaaaagtatgggaaagttataccagcaagtgctgttatatttgggatggcagtagaatgtgcagagataagaagacatcatagagtgggtattaaggacattgctggtatccatttgccaacaaatgtgaaatttcagagtccggcttattcttctgtagatactgaagaaacaattgaaccttatacaactgaaaagatgagtcgagttcctggaggatatttggctttgacagagtgctttgaaattatgacagtagatttcaacaaccttcaggaattaaaaagtcttgcaactaaaaagcctgataagattggtattcctgttattaaagaaggcatactagatgctattatggtttggtttgtgctccagcttgatgatgaacatagtttatccacaagtcctagtgaggaaacatgttgggaacaggctgtctaccccgtacaggaccttgcagactactggataaagcctggagaccatgtgatgatggaagtatcttgtcaagactgttacttaagaatccagagtattagtgtcttgggtttggaatgtgaaatggatgttgcaaaaagttttacccagaataaagacttgttatcgttaggaaatgaggctgaactttgtagtgccctcgctaaccttcagaccagtaaaccagatgctgtagagcagacatgtatattggaatctacagaaattgctttgcttaacaacatcccatatcatgaaggctttaaaatggcaatgagcaaagttttgtcttcactgactccagagaaactgtatcagaccatggatactcactgtcagaatgagatgagctctggaactggacagagtaatactgtacagaacatccttgaacctttctacgtgttagatgtgtccgaaggcttctctgttctgcctgttattgctggcacacttgggcaggttaaaccatacagttctgtggagaaagaccagcatcgtattgctctggacctcatatctgaagccaatcactttcctaaagaaacacttgagttttggctgagacatgtggaggatgaatctgctatgttacaaaggccaaaatcagacaagttatggagcataattatattggatgtcattgagccatctgggctcattcagcaggaaataatggaaaaagctgcaatatccaggtgtttactacaatctggaggcaagatctttcctcagtatgtgctgatgtttgggttgcttgtggaatcacagacactcctagaggagaatgctgttcaaggaacagaacgtactcttggattaaatatagcaccttttattaaccagtttcaggtacctatacgtgtatttttggacctatcctcattgccctgtatacctttaagcaagccagtggaactcttaagactagatttaatgactccgtatttgaacacctctaacagagaagtaaaggtatacgtttgtaaatctggaagactgactgctattccattttggtatcatatgtaccttgatgaagagattaggttggatacttcaagtgaagcctcccactggaaacaagctgcagttgttttagataatcccatccaggttgaaatgggagaggaacttgtactcagcattcagcatcacaaaagcaatgtcagcatcacagtaaagcaatgaagagcagttttccaatgaaaactgtgtaaatagagcatcaacaagtacaaaattcttgtcttaattagtgggggtatataaaaattccttgtaatggtcaaatattttttaaaattgacattaataaagcatattttaaaagattctaaaaaaaaaaaaaaa

SEQ ID NO: 27994 - DNA, 1509 bp, Homo Sapiens
gccgcccgagtgggaaccgcgctggaggaaggcgctgcgcggcaaggagaacaaggggtctgtggaaatcatgagaaaggacttgaatgacgcccgggacctgcatggccaggcagagtcagcagctgcagtgtggaagggacacgtgatggaccgtaggaagaaggcactgaccgactacaagaagctgcgggccttctttgtggaggaggaggagcatttcctgcaggaggctgagaaggaggaggggctccctgaggacgagctggctgaccccactgagcggttcaggtcactgctgcaggcggtctcggagctggagaagaagcatcgcaacctgggcctcagcatgctgctgcagtgatggcgccaacccgtggcagtcccagagctggaggcaggaggatggatcctcatctccatgggaagtgtcagcgtgtggctgccagggaagcgtggcaggcgcctggccttgggtccatctacatagttgcgtgtttcaacaatgtccatttatccttcaccctgaggcgtgttttgggggctgcaaacacctcccggtagaggctggacctgaggacccttcccacctgtgcccgtcccttcctgaagtcctagccacagcccatcctccatgagtcccggcagctctgggtcatgcccttccctggtcacccatctgcccctcacctcgtcatccagggacccagaccctgcaccttccatgtgggcccacagatccttggcaggtacctgaggtgcaccattgagtgtcggatttggggttagcatccagaaagaagaatgcgcatgacgctctgtgaaggctggaactcaggtcttcagggagagaaaggaagactggattgcaccttgatgcctcctgaggaggcggcccccctcttgaggtgggcgtgggcccggcccagccttatccaagtcgctctgtccacctcccccttcctggcccccaccccactcctgtgcctcccaggagccctccctgtgctccacctgcctccgcagaaggaagcctctttctctgtttccctgggtgagggggctggcaggtggctaaccccatttagcatctccaggccctgccatggtgtctcatcttgctgttatctctagctctttccctcctcccatttcctttagtagttgaattttgcaaagcttgtagcagtagctcagttgcctgcagcatccttgtgtgtagataaattagtcgacagaaactcagcactggggacaggattgcaaagtcggggacatagatgcagacagttgttgatatttggggatagccgggcttgtgagcggtgcccatttccagatgaagcctttcagcccttctgagtccccggcccttggtgcgatgtctgtgagtttgacctgcccagcgtgtgggctggctcaatgctgaataaagtgggtttgtgtcagctcaaaaaaaaaaaaaaaaaaaaaaaaaaaaaaaaaaaaaaaaaaaaaaaaaaaaaaaaa

SEQ ID NO: 27995 - DNA, 2681 bp, Homo Sapiens
gcagggtgggggcaggccagctcagcagagcctggggccagagggccagacagccacagagctcctggcgtgggcaaggctggccaaggatggcgacgcccaggggcctgggggccctgctcctgctcctcctgctcccgacctcaggtcaggaaaagcccaccgaagggccaagaaacacctgcctggggagcaacaacatgtacgacatcttcaacttgaatgacaaggctttgtgcttcaccaagtgcaggcagtcgggcagcgactcctgcaatgtggaaaacttgcagagatactggctaaactacgaggcccatctgatgaaggaaggtttgacgcagaaggtgaacacgcctttcctgaaggctttggtccagaacctcagcaccaacactgcagaagacttctatttctctctggagccctctcaggttccgaggcaggtgatgaaggacgaggacaagccccctgacagagtgcgacttcccaagagcctttttcgatccctgccaggcaacaggtctgtggtccgcttggccgtcaccattctggacattggtccagggactctcttcaagggcccccggctcggcctgggagatggcagcggcgtgttgaacaatcgcctggtgggtttgagtgtgggacaaatgcatgtcaccaagctggctgagcctctggagatcgtcttctctcaccagcgaccgccccctaacatgaccctcacctgtgtattctgggatgtgactaaagggaccactggagactggtcttctgagggctgctccacggaggtcagacctgaggggaccgtgtgctgctgtgaccacctgacctttttcgccctgctcctgagacccaccttggaccagtccacggtgcatatcctcacacgcatctcccaggcgggctgtggggtctccatgatcttcctggccttcaccattattctttatgcctttctgaggctttcccgggagaggttcaagtcagaagatgccccaaagatccacgtggccctgggtggcagcctgttcctcctgaatctggccttcttggtcaatgtggggagtggctcaaaggggtctgatgctgcctgctgggcccggggggctgtcttccactacttcctgctctgtgccttcacctggatgggccttgaagccttccacctctacctgctcgctgtcagggtcttcaacacctacttcgggcactacttcctgaagctgagcctggtgggctggggcctgcccgccctgatggtcatcggcactgggagtgccaacagctacggcctctacaccatccgtgatagggagaaccgcacctctctggagctatgctggttccgtgaagggacaaccatgtacgccctctatatcaccgtccacggctacttcctcatcaccttcctctttggcatggtggtcctggccctggtggtctggaagatcttcaccctgtcccgtgctacagtggtcaaggagcgggggaagaaccggaagaaggtgctcaccctgctgggcctctcgagcctggtgggtgtgacatgggggttggccatcttcaccccgttgggcctctccaccgtctacatctttgcacttttcaactccttgcaaggtgtcttcatctgctgctggttcaccatcctttacctcccaagtcagagcaccacagtctcctcctctactgcaagattggaccaggcccactccgcatctcaagaataggaaggcacggccctgcaatatggactcagctctggctctctgtgtgaccttgggcagctccgtgcctctctctgtactccctcagtttccttctctgtacaatgtggctggggagggagaggatgggaccaggttggaccacgtggcatcagaggtcccatccagatccaactataggtccaagagtccacgtaagcaggtttgcaaggctctaaagttcctatagtcctgagaccccctgccagcaaagagtgacagtcacctccatgccctgccctcattgcaaagccctcactcaccttctggtctcagcaagggaggagagtctgttgctggcatagccctggaaggagcccccagcctctcccctcctcctccttgtcactggcctcccacaactccccttctggctgcctgtaaccttgaggggcattcaggaggccagcgttccctcaggcactgggggtttgttttggggggtgggagttgatcctcccacccagtctgcccctggtctctgcccatccaatcagagcccaccctcctggaagagacccccgtgttcagagtgctggcagccctgcacgtgtccagggacactgcatttcaaagaaccactgagtgggtgagctaccttgggcaaaccccccactcctgactctgactgccacgtgggtggcccgacctctgacctgctgtcatcatagaggtagaaagcaaacaatctggggctcagcacacctgggggtgctcccactcattcagtgtgtggggcccctgagcagaggctgggcattgccactagaacctgagctcctagagagcaaggacctgggtggcctcgcttactgttccagcccaggccaagcacagggcctggctcgtggcaaaccttgaataaatatttgttggctgaaaaaaaaaaaaaaaaaaaaaaaaaaa

SEQ ID NO: 27996 - DNA, 828 bp, Homo Sapiens
gggatgcgggggaccagctgcgtgggcggcggcgccgagagccccggaggcgcggggctgagcgagggcccgcgggggcgctggctgcgcttggctccggtatgcgcctacttcctctgcgtctcgctagctgccgtgctgctcgccgtgtactacggtctcatctgggtacccacgcggtctcccgcggcacccgccggcccacagcccagcgcgccgtcccctccgtgtgctgcccgcccgggcgtgccgcctgtcccggcgcccgccgctgcctccctctcctgcctcctgggagtccccggcgggccgcgaccccagctccagctgccgctgagccgccgccgccgctacagcgaccctgaccgccgtccgagccgccagacacccagagagacgccagaggccgcggaggggcgaagacccgggtaactctcccttccaccccaacccggatcgccagccctcgagagctctgtgctccacgccgaggatgcaccgtctctggattggtccggccttcttcctaatgacatcgctcagcgtctctggagccgtcatcccgcggaatgggggcccagggggtgtcagctcggggccttgcctcttgcagctactctgtggtcaggccgggtcctccaccatcaggaagatcccatcctgagctctgtctcctgcccctcctgctgtgggatgctgagcacagagcccacagcccatctgcctcttcacctccctgaatccgtgtccatctgcaataaacgacagcctcggctgcctcgtgctgtgtctgtcctgttgtctgcaaaaaaaaaaaaaaaaaaaaaa

SEQ ID NO: 27997 - DNA, 1570 bp, Homo Sapiens
ggcaggggagtcagcagaggcctcgctcgggcgcccagtggtcctgccgcctggtctcacctcgccatggttcgtctgcctctgcagtgcgtcctctggggctgcttgctgaccgctgtccatccagaaccacccactgcatgcagagaaaaacagtacctaataaacagtcagtgctgttctttgtgccagccaggacagaaactggtgagtgactgcacagagttcactgaaacggaatgccttccttgcggtgaaagcgaattcctagacacctggaacagagagacacacttccaccagcacaaatactgcgaccccaacctagggcttcgggtccagcagaagggcacctcagaaacagacaccatctgcacctgtgaagaaggctggcactgtacgagtgaggcctgtgagagctgtgtcctgcaccgctcatgctcgcccggctttggggtcaagcagattgacatctgccagccacatttccccaaggaccgcggtttgaaccttctgatgtagatgagctctgacattggaagattctggagtctgacaagtcacagcaggttgagggtagggagaaactgcaggtgaggggtgcatgctgaagtcctgatttctccaggtccccaggatcggctgagagccctggtggtgatccccatcatcttcgggatcctgtttgccatcctcttggtgctggtctttatcaaaaaggtggccaagaagccaaccaataaggccccccaccccaagcaggaaccccaggagatcaattttcccgacgatcttcctggctccaacactgctgctccagtgcaggagactttacatggatgccaaccggtcacccaggaggatggcaaagagagtcgcatctcagtgcaggagagacagtgaggctgcacccacccaggagtgtggccacgtgggcaaacaggcagttggccagagagcctggtgctgctgctgctgtggcgtgagggtgaggggctggcactgactgggcatagctccccgcttctgcctgcacccctgcagtttagacaggagacctggcactggatgcagaaacagttcaccttgaagaacctctcacttcaccctggagcccatccagtctcccaacttgtattaaagacagaggcagaagtttggtggtggtggtgttggggtatggtttagtaatatccaccagaccttccgatccagcagtttggtgcccagagaggcatcatggtggcttccctgcgcccaggaagccatatacacagatgcccattgcagcattgtttgtgatagtgaacaactggaagctgcttaactgtccatcagcaggagactggctaaataaaattagaatatatttatacaacagaatctcaaaaacactgttgagtaaggaaaaaaaggcatgctgctgaatgatgggtatggaactttttaaaaaagtacatgcttttatgtatgtatattgcctatggatatatgtataaatacaatatgcatcatatattgataaaaaaaaaaaaaaaaaaaaaaaaaaaaaaaaaaaaaaaaaaaaaaa

SEQ ID NO: 27998 - DNA, 1856 bp, Homo Sapiens
caaggaaggaagaaatgtggtcgcggttggtgtggctgggccttcgggcccctctgggtgggcgccagggcttcacctccaaggcggatcctcagggcagtggccggatcacggctgcggtgatcgagcacctggagcgtctagcgcttgtggacttcggcagccgcgaggcagtggcgcgactggagaaagctatcgccttcgccgaccggctacgcgccgtggacacagacggggtggagcccatggaatcggtcctggaggacagatgtctatacctgagatccgacaatgtggtagaaggcaactgtgctgatgaattactacaaaactcccatcgcgtcgtggaggagtactttgtggcccccccaggtaatatctctttgccaaagctggatgaacaagagccattcccacacagctgagtagctcattctggaaagggggtactctgtgaacatgtggaagcataatgacagtatttttttactgtgaatactaatgttcctgcttttttcagtcccctgaaaaaatggatgctcaagcatttcttaataacagattcttctgaagacagaattgggaaagatctggccccaacaaggcagtgagttcctgatgctaactgaggtgaaagaaaagcaaaagtcagcttccaaggaattcacttaacaggcctgttcagtatggaagacattatttatctgcctttaactccccccaaaggaccataccaactgcatgaaagtgaacttttctatctacgtaactggtagacggagcatcttgatcactatgtgacaaccttggctgtcatttttagttgccatttgcattgatttgagcagccctatctttaccgaacatacctgaatttgttcctgggctcccactttcttcccagaagagggctaacttcctactaaggtctgaagagtgttgaaagtagactagagcttgggaactcctaacctagaactatctgccatcccacaaagtgattatatgccaaagggatactagtcatacctagtgtttctctttctgaaaagagaacttatcctaaaattagccctgggcctgggacaaaggagccctctccgcccccaaaatgattattaaattgagatgagtccaggataaaactcagataccaaggataaatgaaacttatttagggataaaagtgggctgggcgcagtggctcactcctgtgatcccagcactttgggaggctgagacgggcggatcaccaggtcaggagatcaagaccatcctggctaatgcggtgaaacctcatctctactaaaaatacaaaaaattggctgggtgtgatgacaggtgcctgtagtcccagctactcgggaggctgaggcgggagaatggcgtgagccctggagtgcagtggtgacagatcactgcagcctccaactcctgggctcgagtgatcctcccgcctcggcctcctaagtaactgggactacatatgtgcatcaccacgtccagttaatttttttttgagtagaggtgggggttttgctatgttgcctatctggtcgtgaactcctggcctcaagggatcctctggcatgccttggcctcccaaagggctaggatcacaggcaaaagccaccgtgtgtttatttttcccattcccttcctttatctgcaatgcttttttctttaaggcagcctaatttacaagcttggccttgaattaaaagagaacccagaacccgctcttggagtttacgttctcaaaccaacatcagagcaactgtctatccccatataaataaagttatctacccctgctaaaaaaaaaaaaaaaaaaaaaaaaaaaaaaaaaaaaaaaa

SEQ ID NO: 27999 - DNA, 2890 bp, Homo Sapiens
ccggcttctccgcggacagctagggagagtgtcctgggtgtcagccagaacatgtctttcaacctgcaatcatcaaagaaactgttcattttcttaggaaaatcactgtttagtcttctggaggctatgatttttgccttactcccaaagccacggaagaacgttgctggtgaaatagtcctcatcacaggtgctggaagtggactcggaaggctcttagccttgcagtttgcccggctgggatctgttcttgttctctgggatatcaataaggaggggaatgaggaaacatgtaagatggctcgggaagctggagccacaagagtgcacgcctatacctgcgattgcagccaaaaggaaggagtgtatagagtagccgaccaggttaaaaaagaagtcggcgatgtttccatcctaatcaacaatgccggaatcgtaacaggcaaaaagttccttgactgtccagatgagcttatggaaaagtcatttgatgtgaatttcaaagcacatttatggacttataaagcctttctacctgctatgattgctaatgaccatggacatttggtttgcatttcaagttcagctggattaagtggagtaaatgggctggcagattactgtgcaagtaaatttgcagcctttgggtttgctgaatctgtatttgtagaaacatttgtccaaaaacaaaaggggatcaaaaccacgattgtgtgccccttttttataaaaactggaatgtttgaaggttgtactacaggctgtccttctctgttgccaattctggaaccaaaatatgcagttgaaaaaatagtagaagctattctacaagaaaaaatgtacttgtatatgccaaagttgttatacttcatgatgtttcttaaaagctttttgcccctcaagacaggactgcttatagctgactatttgggcatccttcatgcaatggatggctttgttgaccaaaagaagaagctctaaagaccaactctatggctaaggtcatctgatacacagtgttacataatgcgtacttcaatgaagaaaagtatttttgtctgacagtggaatatatctggagaccacaagtaccactcctattctgttatctggactagaattttcaatcaatgtgtttgaaaataatgttgctatcacctatttggttgagttttggttttttctttttctttttttttccaaaaataaagacagcccatttttgtcatttccattaccacagatgtaagaaagtgataagccatggccatgagctgccctgagctttggtcgttggggaggtggctcaaatggagccagcggctgtggttgacctgccttggggagcagggctgaggggcgaagaggacatgtggatatccagccagaatgccctctctccagaggacacacagctctggatttctacccccttgctatcctctctggccattttgaacctgtaccacctaatgtagaaaaggcccgcctccagtgcccttctttccaaaacagctacacaaatgcttctgaatgccctggatacgcagaccgagtggcagtctggctaaaggcccatccagcactattgtgcccaagagccttaccgggcattccctgaagccccctcataggcagtgatcctagaccaaactcttaaatagaatcacttttgtttcctagaagagatcaaagagtggttgcttcttactttgaagatgaaattataccaagttaggttttttgctatctattgatccaaaaaatatattcgtgcaattaaagttaagtgttcaacttagtatttcaagttgggattcaggttgaggcattttcctgcagaatgggcaattttatgcatttatattcatcagtgctgccctcactttggatctattgtattcttacagtttaatcaactggcaaagtgctttcatgctttggagattaactataaaagcaagattaagaaaaatatgttaattaccatatccctggaactccttctcaggctggtgggggcagccttgcaagagaaacagcagcctttgtctcttccctcttgtggggagcaaggaggggatgagcggtaccttgggagacccggtaaaagtctaaagaattgagaatttgactatcttgggggtaaaatgctgtcataggggcagcagtctcagggggtgtaaactctggaatccactatggtttaccttgagtggcctgcacgaacatgacagccctgatctgtatttcctttccattcagaaaaccttaaaaaaaaaaaacttgttttatgataatattataacaatcataactaacatttactgtgcccggcagcaaattaagtatttgacaaacattatttcattaaacgagactgtcaatcattactcaaagaatgatgaaggtatttggtgtatgccaaagaataaaggcgttttatttcacagtgacatcttattccactgtagatgtatactgagaggatcaaaggccctctcagagtcacccactgatgttccaaatccttggttaacaaggttaattaagagagaagcacaatattgctgtaatattacaattccagaagcgtatcttctagggtcctgtctatttagttaaagaataaagctcagactcttcggggattcagtacaacaaaggtccaggagcactgcaggcatcctccacatcataacagcattaatagcaattatttctaattggagtgcatcttggctggactgcgacaaaggcctgaaattcaattgtggttttaaaatacccataaaattgtctaaacaaattcaaaaaaaaaaaaaaaaaaaaaaaaaaaaaaaaaaaaaaaaaaaaaaaaaaaaaaaaaaaaaaaaaaaaaaaaaaaaaa

SEQ ID NO: 28000 - DNA, 1534 bp, Homo Sapiens
ggaacctggaattcaagctgtgggtgagaagctctctagcagggactctgaccttatggaggatcgctgtttcccccatttttccttttcacccaaaaaagtcctgcttctctcacccttcaaacagcctgtgagcctaaatttttgtggccatgggacagacaaggaccccgtcttcagctgaactaaggaaaagtcctgcgacatctttggtacgcactgtggaggctctacaaacagccatcaaactccaaccagtcacccaaccagagcctctgaggatggccccttctgcggggaacccttacatgggcctctgactgatgcttccccaaaacagtgccccctgtcatcaggaagcagttaacactggtcttcattcttacgcttatccttattctaacagcagttatatgtacttctttagacgggggaataagacagccaggtgggagggggtctctggaaaactccatctggcctgtgcactagggtggaacctcaggaagttgatgacatttgtagctgggagcagcctggcccctcctcttcctgtgtggaacctgaaattccactggcttggcaggaagcgctctagcagggactccggctttgcagagcatccctgtttccccgtttttcccttttcacccaataaaaccctgcttcactcacccttcaaaccatctgcaagcctaaatttttgtggctgtgggacggacaaagatgcctttagctgactgaggaaaagtcctgcaacacaggtatcactgcacatttataatattgtttctctgttttaaaccttgtataaataggaaaatattgtatataatctcaagcagattgttttcttttgaaaagtattcatatatgttaaagatgtagttctagttcattcattttctctgttttgactcttttatacatgtactacagctcatttatccattttcctactgttgcaacatagattgcttataattcttctaattactaacaatgctggtatgaaattgttgtgtatatctctggtagatatgtgttatttcttttttgcaatgctagattataattatttgtctaaggtggagattaccagggtagactcgctctggccatatgtaatgatgtctgtggctacataacctgccaacacttagtcttatcacacattttattttaaaatcaatatgtaaaaaatactaatttacttggtagtaatttaaatttttctgattattactgaggttgaatatgttttcatatgtttactgaatattcctgttaattttctcatgaatttcagttaatgtttctgttgattttattaatttgtagtggttttgaaacatattctagaaaccaatattttgtctgttgtatgtgttacaaatatatttattttgtatagcttcttcatatttagtacttttacaattttaacagtaaaattagtttcatgttttatagctataattattataacttttaaataaatatttcctcaattaaaataaaaaaaaaaaaaaaa

SEQ ID NO: 28001 - DNA, 2955 bp, Homo Sapiens
gccgcggtcgctatggaggagccggagatgcagctcaaggggaagaaagtcacggacaagttcactgagagcgtctacgtcctggccaacgagccatccgtggccctgtaccggctgcaggagcatgtgcgtcgctccctccccgagctggcccagcacaaggcagacatgcagcgttgggaggagcagagccggggagccatctacactgtggagtacgcctgcagcgccgtgaagaacctggtggacagcagcgtctacttccgcagcgtggagggtctgctcaaacaggccatcagcatccgggaccatatgaatgccagtgcccagggccacagcccggaggaaccacccccgccctcctcagcctgatcctggaagagactcggggccccccagcctccgccaacccaggtcagtgccgagggtagccacgagcctctctctctgctctgaactaaccaacccgcccgcttggcagccaggcaggcacctgcttgtctaaccacttggggtttctcactgggcttgtgggatgatttcggaggtggcaggtggaggggtgtctgcaggtccagaatgttccaccctgctgctcagggaccatgtcagcccatctctcccactctctctccaccaccttcctctctcttttccaggccataggccccatgctagtcccagagatttccaccccccaagacagagaagggagcccacatttcctctatcctaccacgtgccagcagcctgctttacccgtgcacagtctctcaggcagagcccggcatgggcaattacccacctatctctgggacctccccacccatctactgcctacctgctgtgtgaccgagcaaattcactaccctctctggtctctgcatttactttctgtaaaggtggctctcaggtgaccaagagggtgcagggcacagtgacggatgtgctttggagcagtcggctattgctgcataacacagcatcccaaaacagtggtttacagccccagtaattaacctactcatgattctgcactttgggctgggctcagctgggtggttctgctgctgtccctggggctcacccatgtggtgctcatgggagctcagctgcacctgcatagtcagggggtcccttggccaggactgttggcagcaggggtcagattttcctcatggcctctccagcaggccagcccgggtttctcctggtggctgggagccaggagagcggctcccatgcagagtgctggtttcacatttgtgggtggcccatccgttgaggccagtcacgtggccaggcccaggaccagatgggagaggaccgcacaagtgcagcgtgagctgtgggaggtgtggctgaccacgcttagagagtgtggtgccaggaaagatctgatgtgtcaccattctatatctgtgatgggcagacgcaggcaggtcaaaggggccctggggacttaccgagcccctgcctattggccaggcactgtgattgtcctcggtgccatgtgccatggaagccctctcagaggtcgaggggaggcaggtggagacagagcctctgtaggcctttcaagctgtagccccagagcccagaggcagccgaattcatgtgtgcagtcagagagcacttagtgggcactgtagtcaatcagtgagcgcttactggacaccacaggcagcaagcatttactgagtacctctggcagttgatgcatacttcctgagtacctgttcatagcaggcttagctctggatgtggggtggtgaggaatcccacaggctgaggggtggcctgggagctttccagggggcctgaagcaggaggggctgcctgagtgggtcagcagcccagcccagtgccctacgcagccctgcccacacccccaacccagcctctgtctccccagtcccatcccccacaccctggtccctcctactttgtgcctcgaggacactgccccgctgccctcctcacttcccagcgtctgctgtcccctccgctgctgctgcccggcaggattgctctgtgtctcatccacgtttgtccctgcagagttcctcgcctctccctggaaccgccagcctcatgccgcatctcagaggctttttttttctctcttttttttttttttgagatggagtctcgctctgtcacccaggctggagtgcggtggtgcgatctcggttcagtgtaacctctgcctgtcaggttcaagcgattatcccgcttcagcctcccgagtagctgggactacaggcgcacaccactacccccagctaattttttgtattttttgtagagacggggtttcaccatgttggctaggctggtctcaaactcctgagctcgtgatcctcccgcctcagcctcccaaagtgctgggattataggtgtgagccaccgcacccagccttggttctccctttcttcatctggataaggaaggctggactgcaccttctctacaggctgagttggacattcgcagatctaccctcccaacctgcattctgcctcaagcagcaacgcccaccccaggctcaggccacatggagaagccacccctagttccagtggtggatgtggcacctcggcctggccaatcagagctcccttgtcctaggttcctagtgattggtttgagatggacacgtgacccaatgagcgacctttcctgggagttctaccaggagcatcaggaaggttgagctgggtgtatgggaaccaggccggggcgaggggttccggggggacctgagaacattgtgtggagccctggatccaactgtacctgacactagccaatttcatttcttcagtttcatggacccctaaattatgatttttgccaaaatggaaaaaaaaaaaaaaaaaaaaaaaaaaaaaaaaaaaaaaaaaaaaaaaaaaaaaaaaaaaaaaaaaaaaaaaaaaaaaaaaaaaaaaaaa

SEQ ID NO: 28002 - DNA, 1265 bp, Homo Sapiens
gggacgaagccatggccctggaggcggcgggagggccgccggaggaaacgctgtcactgtggaaacgggagcaagctcggctgaaggcccacgtcgtagaccgggacaccgaggcgtggcagcgagaccccgccttctcgggtctgcagagggtcgggggcgttgacgtgtccttcgtgaaaggggacagtgtccgcgcttgtgcttccctggtggtgctcagcttccctgagctcgaggtccttcttgtggatggaaacggggtactccaccaccgaggctttggggtggcctgccaccttggcgtccttacagacctgccgtgtgttggggtggccaagaaacttctgcaggtggatgggctggagaacaacgccctgcacaaggagaagatccgactcctgcagactcgaggagactcattccctctgctgggagactctgggactgtcctgggaatggccctgaggagccacgaccgcagcaccaggcccctctacatctccgtgggccacaggatgagcctggaggccgctgtgcgcctgacttgctgctgctgcaggttccggatcccagagcccgtgcgccaggctgacatctgctcccgagagcacatccgcaagtcgctgggactccccgggccacccacaccgaggagcccgaaggcgcagaggccagtggcatgccccaaaggagactccggagagtcctcaggtgagggccagcccccacaggaccacagcccaggccccaggacagccccaaggccaggctcccaggagcaggcgggcaaggactggcagtagggtggaactgggcaccatgaagacaagaaggccaccggccaccccgttctggcctcaggacactgaccacccctgggggtggtctagggacttaggggaacctcatctcagccgcaggtggagcacccagtccccaaagacaggctgaccgcaccaccccagggggacgccgcagcacagcccagcaccaggtggggcagaggtgaccacggcccctctttgctccgtcatcggctggtcagctgtggtcacggtgcctcagaggacagatctctatgggggcaagtgccagatcctgagagcgcatgagacgctttcccggagccgacgaaggggactcggagctgcagcctgcacgacccctgcagcctgtgctttgcccacccctttcaatagatggaacttgcttgctcttttttaaaaaaaaaaaaaaaaaaaaaaaaaaaaaaaaaaaaaaaa

SEQ ID NO: 28003 - DNA, 2474 bp, Homo Sapiens
gccccctgcattgctgatgctgctgctggcggacatggacgtggtgaatcagctggtggctgggggtcagttccgggtggtcaaggagcccctcggctttgtgaaggtgctgcaatgggtcttcgccatcttcgcctttgccacatgcggcagctacagtggggagctccagctgagcgtggattgtgccaacaagaccgagagtgacctcagcatcgaggtcgagttcgagtaccccttcaggctgcaccaagtgtactttgatgcacccacctgccgagggggcaccaccaaggtcttcttagttggggactactcctcgtcagccgaattctttgtcaccgtggccgtgtttgccttcctctactccatgggggctctggccacctacatcttcctgcagaacaagtaccgagagaataacaaagggcccatgctggactttctggccacggctgtgttcgccttcatgtggctagttagctcatcggcatgggccaaggggctgtcagatgtgaagatggccacagacccagagaacattatcaaggagatgcctgtctgccgccagacagggaacacatgcaaggagctgagagaccttgtgacctcgggactcaacacctcggtggtgttcggcttcctgaacctggtgctctgggtcggcaacctgtggttcgtgtttaaggagacaggctgggccgccccgttcctgcgcgcgcctcccggcgcccccgagaaacaaccggcacccggggacgcctacggcgatgcaggctacgggcagggccccggcgggtacgggccccaggattcctacgggcctcagggcggctaccagcctgactatggtcaaccagccggcagcggtggcagtggctacgggcctcagggcgactatgggcagcaaggctacggcccgcagggtgcacccacctccttctccaatcagatgtagtctggtcagtgaagcccaggaggacctggggggggcaagagctcaggagaaggcctgccccccttcccacccctataccctaggtctccacccctcaagccaggagaccctgtctttgctgtttatatatatatatattatatataaatatctatttatctgtctgagccctgccctcactccactcccctcatccactaggtgcccagtcttgagtgggccccctctcttaccccgtccctttccctgcatcccttggcccctctctgtttaccctccctgtcccctgaggttaaggggatctaaaaggaggacagggagggaacagacctcggctgtgtggggagggtgggcgtgacttcagactctctcctctctctccctccactcctcccaactctggccttggttcctccagcaatgcctgcctgaacaaaggccgttagggaaatccaactccagggttaaagaaaggcagagattgggggggcttggggtagagaggacagtttaggacccaaggtggtcttggagaggaggtgtggagtggaggggtcagcaggggggttgggttccagacagagtggatctggagtctgaaggagaggagtgcgctagagcattctggggtggggcttggaagggcgctgagggcagggttctagaaggggcgaggctttaagcgaggcagaatggtgggctccagagtaggtgggtcttggattggtaccagagcctatggaaagggtgtggcttggaacatttgggagactgagcttgattctaaaggggacagatcttgagcaaggcaagaagtgggattcaggaatgggccaagccagggttccagacagggtggggcttagaatggggcttccatggtggtttcagaaagggcagcccctccccatggtgcagtgaagaaaatgttttacaatggctgggtttgggcagtggagaggggacttggataggagcttccagatgggttttgttaggggtgggggagaatggctctggctacgacttgggacggaagtggcctgagaagagtcgagtgatatggcttgtagggtgaggcgtgggatccagagagaagcaccccaccacacacacccttccccactcccgtgatgaaacagctaggttaataggaggacagaaccaacgggtctgtgggactggcccacccctcttcccccttcccctgcgccctccctccctccacacctccacccgtcctggggtggttggaggcctggtctggagcccctatcctgcaccctctgctatgtctgtgatgtcagtagtgcctgtgatcgtgtgttgccattttgtctggctgtggcccctccttctcccctccagacccctaccctttcccaaacccttcggtattgttcaaagaacccccctccccaaggaagaacaaatatgattctcctctcccaaataaactccttaaccacctagaaaaaaaaaaaaaaaaaaaaaaaaaaaaaaaaaaaaaaaaaaa

SEQ ID NO: 28004 - DNA, 2457 bp, Homo Sapiens
gcgcggccacgcctgggccggccaccatttcccgggcgccgcggcggcgccgactcgcgggcagcggcccctcagtgcgcccagccgggcccccgaacgccgggagcatgagcgcgggctcggagcgcggggcggcggcaacccccgggggtttgcccgcgccctgcgcctcgaaggtggagctgcggctcagctgccggcacctgctggaccgcgacccgctcaccaagtccgaccccagcgtggcgttgctgcagcaggcgcagggccagtgggtgcaggtgggcagaaccgaggtggtccggagcagcctgcatcccgtgttctccaaggtcttcacggtggactactacttcgaggaggtgcagaggctgcgctttgaggtgtacgacacgcatgggcccagcggcttcagctgtcaggaggacgatttcctggggggcatggagtgcaccctggggcagattgtggcccagaagaaggtgacccgcccgctgctgctcaagtttggcaggaacgctggcaagtccaccatcacggtgatcgccgaggacatctcggggaacaacggctacgtggagctctccttccgggccaggaagctggacgacaaggacctcttcagcaagtccgaccccttcctggagctctacagggtcaacgacgaccagggcttgcagctggtgtacaggacggaggtggtgaagaacaacctgaacccggtgtgggaggccttcaaagtctctctgagttccctctgcagctgcgaggagacaaggcctctaaagtgcctggtctgggattacgactctcgaggaaagcacgacttcatcggagaattctctaccaccttcgaggagatgcagaaggcctttgaggaggggcaggcccagtgggactgtgtgaaccccaaatacaagcagaagagacgcagttataagaactcaggagtggtcgtcctggctgacctcaagttccacagggtgtactccttcctggactatatcatgggcggctgccagatccacttcaccgtggccattgacttcaccgcctccaatggagacccgcggaacagctgctccctgcactacatcaacccctaccagccgaacgagtacctgaaggcactggtgtccgtgggcgagatctgccaggactatgacagtgacaagaggttttccgctttggggtttggagcccggatccctcccaagtatgaggtgtcccatgactttgccatcaatttcaaccctgaggacgatgagtgtgaaggcatccagggcgtggtggaggcctaccagaactgcctgcccagggtccagctctacggccccaccaacgtggcgcccatcatctccaaggtggcacgcgtggcggcggccgaggagagcaccgggaaagcctctcaatactacatcctgctgatcctgacggacggcgtggtgaccgacatggccgacacacgggaggccattgtgcgtgcctcacgcctgcccatgtccatcatcatcgtgggcgtgggcaacgccgacttcaccgacatgcaggtcctggacggcgacgacggcgtcctgcgctccccacggggtgagcccgcgctccgggacatcgtacagttcgtgcccttccgggagctcaagaacgcatcccctgcggcgctggccaagtgcgtgctggccgaggtcccgaagcaggtggtggagtactacagccacagaggcctgcccccgagaagcctgggcgtccctgccggagaggccagcccaggctgcacaccgtgaagatgtggagggcgtagggtgggggcagtgaggaatgggtccatacagcctctgtctgcaacatgcttggggtcccttaagctccctccgacctcccagaagcctccagtccccaccaggccccactcccagtcctcctgggatcctgctggcttgggcccggctctggggcccccaaggccgaagggtgacaaaatacaggcccccatgcctggccctgcctgagccaggtgggtggagggagggagatcatgagggacttggagggagctgggagttcatccacgggagaccctgccccgatgagaaggggcagggactgggggctctgctttgcgtctaacctttgtgggggagggccagcaaggcagtccccccacgcccgagaaagcctgggggacccagacacctgtccccacagtcaaagcctggggacccagacatcctgtccccacagtcagcctcctgtccctgctggtgcccccacacccacctaccctgtgctttttgccgtcgggcctctgcacctgggtccatggggtctgcggggtctgcggggtctgcctggcctgtgggttctgccggtggggcttcaggagtaataaagtgtcaccctatccttgtaaaaaaaaaaaaaaaaaaaaaaaaaaaaaaaaaaaaaaaaaaaaaaaaa

SEQ ID NO: 28005 - DNA, 1795 bp, Homo Sapiens
accgccgccgccgccgctggccaaaaagcggagcccaggggaagcgtgtcctgctcagaccgccttccttctccattgccacccgtgccgaacagccaggctgcccaattgcaactgtagaccaatgaactaatccatcgcccgcagcccgactctcagcagcggttcgtcccggtgcccacccccgcgaagcggagcgcccgggcacctagcctccctgccggccacctagcctccctgccggccacgatgccgaacgtgctgctgccgcccaaggagagcaacctcttcaaacgcatcttgaaatgttatgaacagaagcagtacaaaaatggcctcaagttttgcaagatgattctgtcgaacccaaaatttgctgaacatggagagactttggctatgaaaggattaacactgaactgtttaggaaaaaaagaagaagcttatgagtttgttcgtaaaggacttcgtaatgatgtcaagagtcatgtctgttggcatgtatatggactcttgcagcgttctgataaaaaatatgatgaagctataaaatgttaccgaaatgccctcaaattagataaagataacctgcaaattttgagggatctctcactgttgcagatccaaatgagagaccttgaaggttaccgagagacaagataccagcttcttcagttgcgccccacacagcgtgcctcctggattggatatgctattgcataccatttgctgaaagattatgatatggccctaaaactgttggaagaatttagacaaactcagcaagttcctccaaacaaaatagattatgaatatagtgaattgatattataccagaatcaagtgatgagagaggcagatctgttgcaggaatctttggaacatatagaaatgtatgagaaacaaatatgtgataaacttttggtggaagaaattaaaggggaaatactgttgaaattgggaagattaaaagaagccagtgaagtgttcaaaaacttgattgatcgaaatgcagaaaactggtgttattatgaaggcttggaaaaagctctacaaattagcactttagaagagaggcttcaaatttatgaagaaattagtaagcagcaccccaaagcaattacacccagaagattacctttgactcttgtcccaggtgaaagatttagagaactaatggataagttcctgagggttaacttcagtaaaggctgcccacccttgtttactactttgaaatctttatattacaatacagaaaaggtttctataatccaggaacttgttactaattatgaagcctctcttaaaacgtgtgacttttttagcccatatgagaatggggagaaggaacccccgacaacactactctgggttcagtatttcctggcacagcactttgataaacttggacagtattctttggctttggattatattaatgctgcaattgctagtactccaactctaatagaattattctatatgaaagcaaaaatttacaaggtaaaatctgaatcctgttttttgagtagttgaagaattcagctactttaagaatccttggagttttttctttgtggaaacaagttctagggcaccctgataatctttttctaataatcctgtgtagtttcatgttatattaattgtataatcaatgtgtaattagatgtgtaatcatttgagctcttagtaaatgtgaactgtaattttgatttctaaataaatttgacagaaatggtgacaaaaaaaaaaaaaaaaaaaaaaaaaaaaaaaaaaaaaaaaaaaaaaa

SEQ ID NO: 28006 - DNA, 2076 bp, Homo Sapiens
gacccacgcgtccggtgcatataatacagttagcagacccttacagagtcaaaagagattttggaatctggtgatactgttgtttattacactagcctattacattttctttctttataataactgtttatgtgagtttcattgaaaatcgtggctctattgctttattcatggtttccacaactctttttgtaacaccttaattttctctcttaggtattttcctgttaaataagatatcaaaagcatcaatcacaagacagagaaaacgtattaggaaaaacttgtattagtatattctaaactgaaatggaaaaactcattattcatattttaataaataaaactcccaaatgatcttgctaaattatcccactatttagaagtagaaaataagagaagagtgctttcaaggaaatttgtcatattctcccttctatctagaagttgacaatgaattgcaataaaactaagaaataactgaatgctgaaaaataccatgaattaatgttatggcttctttatttttgtatatccattcccacaaaattgaatttaagattattaatgaaaattctatattaagtaataatgcttgtattagtaatgggcaaagaagtctttctttgttacattaaccgttagtaaaagatgtactttgacatttctgatgtaaaacctatatgtaaatattgtaatttaaatatgattggacagctgttaagttttggggagggaagcagatgccagcgttctctgctgaaaagacaagatggcgcttgacggaccacagcagatggagctggaggaggaaaaggcaggcagtggactctgccagtattatctgtccaagattgaagaactccagggtcaactgcaatataaattggatgggggaaagccacaaggaacagttctgaactccaggtgcatttgcagctgattttgaatgataagacccaaaacctctggaggcggcaggtgcacgggaatgaactaaatgttaaagtgtgcctattacaggaggagctacagctgctgcaggaataggactcctgtgtcagggaagtagtccaggccatgggtaagaagaaagtgttggtcaaggtgcatctcaaggacaagtttgtcatagatgtggacaaaaatatcagcatcagtgatgtgacacccagttccttggtggttctaagaaatgacagctacactttgcacaagatcctacccaacaaggtggactcattggtgtcactgatgatggtgaagaaagtaccagattcagcttatgaaatgattggtagactggataggcagatcaagaagatcaaagaagtgatcgacctgcctgctaagcatcccgagctcttcaaagcactgggcattgcacagcccaagggaatgctgcttggaagagactgttggcctgggctctggctcatcatagggactgtgtacctttattcatgtctctggctctgaattggtacagaaattcattggggaatttctgtgatggcagagaaaatgctcatctgtcatcttcatggatgaaattgactcttttggctcctcagagctggagggggatgctggagggaacagtgaagtgcagcagatgatgcttcgagggtggctttgaggccaccaagagtatcacggtttatcacggctgctaatacgattgatatcctggactcggcactgctttgcccagggcacattgacagaaaaattgaattcccaacctgcaatgagtaggcctggctggtcactttgaagattcattctcagaaatgaacctgacccaggggatcaacctgagaaaaattgctgagcttatgccaggagcatcaggctgaagtgaagggcatgtgcacagaaaccggcatgtatgccctgagtagcgagtccatgtcactcagaaggactttgaggtagtccaaagtcctatctcatgccaaaggacagtgaggaaaaacatgtccatcaagaaactatggaattgagggcacatcctttgtgtgtatccctacaataaaactcagtgggacaagcaaaaaaaaaaaaaaaaaaaaa

SEQ ID NO: 28007 - DNA, 2488 bp, Homo Sapiens
gcgcacggtatggcggcggcggcggcggcggcgcgcgcctgagaagaggggacgccagcccggtcaggcctcggcgcggcctacacgctccgctcgctcgctcgctcccgcctcccgccccgcgcccggccatggcggagccgtcgtccgcccgacgcccggtgcctctcatcgagtcggagctgtacttccttatcgcccggtacctatcggcgggcccgtgtcggagagcggcccaggtgctggtgcaggagctggagcagtaccagttgttgccgaagagattggactgggagggcaacgagcacaacaggagctacgaggagttggtcttgtccaataagcatgtggctcctgatcatcttttgcaaatctgccagcgcatcggtcctatgttggataaagaaattccacccagtatttcaagagtcacttctttacttggtgcaggaaggcagtctttgctacgtacagcaaaaggtaccttaatttgaagaagtgttctgctttgtattaatagcctaataattattataattgtgaagtaatgtaagcattgtggaagaaaggtgataatgtaactataaatcatgctgtggactataaaattctctgcatttagcatagaacattgaattttattacataagtgtttaatgggtccttctgcattaaaaagttgataaagatatagatgttaagctaaaaagcttgaatttattctgagatgttgtttgaggttttatcaatgtgagttcttaattttccattttgtagctcactcataacttcattgaatgtaattgtatgtgtctaataaactctttaaatgctagaggtatttcatttgatatttagcttctgaaagccctttgttataaagggaagtgattttctaaatttggtagcagcttgaaaacaagcaccacaaatgtaaaattgcatggttctttttttactaatttaatttttttgccaagttatgtgctagcaaaatgtttgaaattgctattctttttctgttagcttggtatatatgacttagactaagtatatgtatgtgatataatatatgtgtacatgtggctaaactgctaatgggcaaagattgttggttcttctgatgctgagtatacatcaagttcatcccatgattattttttattacgagctattgctgatgtgatgctactcttagctgcaccaccagtataaagcttaactgagaaagaacacccctccctcttagttccgtgccagactggtttgttagctttagttgtttcttagtgctctagccatgtcaccctgtggcactaatcaggacactgtttatattcttcctcttctgtgtccctattcactttgtaattattctattttagctggttatatggtagttaattggtagcctgttttcctttgttttctttacttgtgtcaagctccatgtcgttgttttgtgatgagcagtgatttagaactggccagaccttagaagagtcttcagcaagctgccctagggtaggggcatattctctgtttgttttgtactggtaccccaggaggatgccttgtaactgctctttggtcatgatagtggtaatgaatccattcatgtaaaatgcaatatgtctgttagtttggggcacccgaggctcagtagaggtttagtatgatgccttccctttcttctttgagttatgaagaaactaatttctggcacagtgtgactgcttcaaacctatgttctgatgctatctcctatagaggagggcagacttttttttcttagtgcatttgctggtaggtcaaggagggatggactttgaattagtgttcagagtcacagatcctacgtatgtgctcttcagtagaggattttctgtgatcctacaatgaagggaaagctatataatttattggtacttcctaaagatagagactaaagtcatggtagtattggccaaattaattttaaaactgaacaagtcatgaattttcatataaatcaaagaactttttccttataaaagcttccatttttgaaaagttggatcagttgtaagacctttcatctttagtattgtatgatataattctacattgaaaaataaacacttggcattaaatgggacttggagtcaaaagatctggttttatggtccatctttaccaatcatttgctgtggatctctttaaaggtcctggaacctttgagcctcagttacctcacttgtaaattggcaaaaatacctacctcacagggttgttgtgaggattcaatgagctaatgtatgttgaaagcactttgtgaattgtaaagtgctacacaaatgttagttgttgttgctgctgtatctgagatgtcttaattttctttttcttcagaaatagtctaataaacctccagggcttttctgttaaagtatactagttggtaaaatgttgaataaacagtttattacaatataaaaaaaaaaaaaaa

SEQ ID NO: 28008 - DNA, 3232 bp, Homo Sapiens
gcggcgggctccagggagacctgggtgggcagcgtcgccgtttctcctttcttgggcagtatttttcccagcgccacgcggaggctgggccattatgagctctgcatttccaggacctggtcactattcaggacacggttccagcgcagtgcgcgttagccatgtctcagggatgagtgacattccaagatgtggccattgacttctccaaggaagagtggggattcctgaaccctgctcagagagatttgtacacaactgtgatgctggagaattatcagaacctggtctggctgggactttccatttctaaatctgtgatttcactgttggagaaaaggaaactgccttggataatggcaaaagaagagataagaggcccattgccaggatatttcaaggtgtcagagatgaccatctcccaggagccaaaggcaaagactagaactctctttggaaaaggttaaattatttactacacaatggctaagatttattttagcaaaagatataaaacaaaatcagcaaagatgtgccaggtgcagagattaaggagttatctgcaaagagggctattaatgaagtattatcgcagtttgacacagtgataaaatgtacaagaaacgtatgtaaggaatgtggaaatctatactgccacaatatgcagcttactctccataagagaaatcatacacaaaagaaatgcaatcagtgtttagattgtgggaaatacttcactcgtcaatcacctctcattcagcatcaaagaatccacacgggagagagaccctataaatgtaacgaatgtattaaaaccttcaaccagagggcacaccttacctagcatgagagaattcacactggtgagaaaccttacaaatgtaaggaatgcaggaaaaccttcagccagatgactcatctcacacagcatcagactacacatatgagagaaaagttccatgaatgcagtgaatgtggaaaggccttcagccgtgtctcagctcttatagatcaccagcgaattcatagtggagaaaagccgtatgaatgtaaggagtgtggaagagccttcactcaaagtgcccagctcattagacatcagaaaactcattctggagaaaaaccctatgagtgtagtaagtgtaagaaatcttttgtgcacctgtcttccctgattgaacattggagaattcacactggagaaaaaccatatcaatgtaaggactgcaaaaagaccttttgtcgtgtgatgcagttcactctgcacaggagaattcatactggtgaaaaaccctatgaatgcaaggaatgtggaaagtccttcagcgcccattcttctcttgttactcataagagaacacacagtggagaaaaaccgtataaatgcaaggaatgtggaaaagccttcagtgcgcactcttcccttgttactcataagagaacacacagtggagagaaaccctatacatgccatgcctgtgggaaggcctttaatacttcctccacactttgtcaacataatagaattcatactggtgaaaaaccctttcagtgcagtcaatgcgggaagtcctttagctgcagctctcaccttactcgacactgtagaatgtgtaatggaaaatttagcaaataaccaaaactcaaaatgttaattctgattattctgtatcatcaccagtactttgtactttgagtctttttaaatatgctctgttagtttgtatggaatgatatttcattgcacttttaatttaacttaaaaatgccttcccttgactgttgatatgtattttttgtgaagtgtgtgttgaagccttgcagattattttttaaattagaggtttatcactaggtatatctcctaatgctatccctcccccctccccctaatgtaaatgatgagttaatggtgcagcacaccaacatggcacatgtatacatatgtaacaaacctgcacgttgtgcacatggtaccctaaaacttaaagtataattaaaaaaaaaaattagaggtttttcttcgggtgcatttatgagagttcaccagattttggaaatattttctattctgtaacctaccttttcatttacataacagtgataaaagctttaagtttgatcacaaccaattaatcacattttttaatagttatgcttttatttgtttttcagacagggtcttactctgtcacccaggctggagtgcagtggcacaatcatggctcactgcagtctctgcctcccgggctcaagtgatcctcccacctcagcctctcgagtagctgggactacaggcatgtgccaccacgcctgatttctatattttttgtagagactaggtttcaccatgttgtccaggcttgtcttgacctcctgagctcgagtagtccatctgcctcagcctcccgaagtgctgggactacagacatgagccattgtgcctgacctagttctgctttttatgttctaagaagtattatttattctatgctgagcttacatagaatttcttccatgttttctatagctatagtgtatttttaccttttactgttagatctatttcatgtttttattatggataatggaggaggtaaaggttgaattatattttcccccatattattgacccatagtgacaccagttttgggagatgtctttcattttcgcccttacgttgttattggcaccttttgcaaaaatcaattatttatcatgagtatacttctgaaatgatctgtttcatcaatctatttgtcttctcagtagttccacattgtcttaattatagctttagaggaagtcttgaaatttggtagtaagtcttccagttttgttattttaacaaatttctctaggctgggcatggtggctcatgcctatagtcccagcactttgggagccccagacaggaggatcacttgggcgcagaagatcaagaccagcctgggaaatatagcaagaccttatctctacaaaaaaatttagaaattagctgggcatggtggcacccatctgtagtcctaactgctcgggaggctgaggtgggaggattgcttgagtccaggagttcaaggctgcagtgagttgtgatcacaccattgcagtccagccaggttgacagaatgagaccctgtctcttaaaaaaaaaaaaaaaaaatcctggtgatgcttttctggattaaaaaataaaataaaataaaaattggcctcaaaaaaaaaaaaaaa

SEQ ID NO: 28009 - DNA, 1850 bp, Homo Sapiens
ggaggagcggccgggggcctggttcggcttcggtttctgcggcttcgggcaggagctgggctccggacgcgggcgccaggtgcacagccccagtccgctgcgggcgggcgtcgacatctgccgcgtgagcgcgagctggagctacaccgctttcgtgacccgtgagcactccccgccccgtccccacttattccagccgcgctccccagtcgcctccccgcaccgctgtggccagtccagtttgtctcccccgttcaggccgccagccccacattctgggttggtccccaattcgaccccttcccaggaacaccccgctccccccatccccgccgcctccattctggccaccctgctccaatccgccccgcaggtggaggccgcttggagctgtcgggctcagccagcggcgcggcgggccgctgcaaggacgcgtgggcctcggaggggctcctcgcggtgctgcgcgccgggccggggccggaggcgttactgcaggtctgggcggccgaatcggcgctgcgtggggagccattgtgggcccagaatgtggtgcccgaggccgaaggggaagacgatccggccggtgaggcccaggctgggaggctacccctgctgccctgcgcccgtgcctacgtgagcccgcgggcgcccttctaccggcctctggctccggagctgcgggcacgccagctggagctgggcgccgagcacgcgttgctgctggacgctgctggccaggtgttctcctggggcgggggcaggcatggacagctgggccatgggaccctggaggcagagctggagccacggctgttggaggcgttgcagggcctagtcatggctgaggtggccgcggggggctggcattctgtgtgtgtgagtgagactggggatatttatatctggggctggaatgaatcagggcagctggccctgcccaccaggaacctggcagaggatggagagactgtcgcaagggaagccacagaactgaatgaagatggttctcaggtgaagagaacgggtggggctgaggatggagcccctgcccccttcatagctgtccagcccttcccggcattactggatctccccatgggctcagatgcagtcaaggccagctgtggatcccggcacacagctgtggtgacacgaacaggggagctctacacctggggctggggtaaatatggacagctgggccacgaggacaccaccagcttggatcggcctcgccgtgtggaatactttgtagataagcaactccaagtaaaggctgtcacctgtgggccgtggaacacctacgtgtatgctgtggagaaagggaagagctgacatgtgtacgtatatgtatatgcaacacctgtgagacccccattcaggtcaaggaaaaccattgcctgcaccccaagggccccatatttgcccctccccatcacagtcctgcccttcaccctcaagcacggtcctaaacttgtctgcactttagaaacacctggagagcattgaaaactctgctgcctaaggtcagcatcaatcaaaacaatgaaatcaatgaaacaatgaaaccagagcttctaggtgtgtggcctggatagtggtagattcaaagctccacccacctcatcccaggtacatttgatgtgcagctgagattggggcacattccaggtcatcgtcttctgtcagtcatttccctgctttcgtttgaattttaccattcttgtatgcagccttatacgacatagttgtgtttgcttttgagtgttagataaatggaatcctgtgtaaaaaaaaaaaaaaaaaaaaaaaaaaaaaaaaaaaaaaaaaaaaaaaaaaaaaaaaaa

SEQ ID NO: 28010 - DNA, 5271 bp, Homo Sapiens
ggcggcggtgcagcgctccggtggaatgaatcttacttgttgaatatcttctggttactagttggattcatttgtgaaagaatcattttcccctgtgtggaagacacttagtggcatatttaaattataagtccacggatcaaaaagctttttgatttcccaaaggagggacataccactatatcagataagcttgacattacagccaagatggtgctgtcccagagacaacgagatgaactaaatcgagctatagcagattatcttcgttcaaatggctatgaagaggcatattcagtttttaaaaaggaagctgaattagatgtgaatgaagaattagataaaaagtatgctggtcttttggaaaaaaaatggacatctgttattagattacaaaagaaggttatggaattagaatcaaagctaaatgaagcaaaagaagaatttacgtcaggtggacctcttggtcagaaacgagacccaaaagaatggattccccgtccgccagaaaaatatgcattgagtggtcacaggagtccagtcactcgagtcattttccatcctgtgttcagtgttatggtctctgcttcagaggatgctacaattaaggtgtgggattatgagactggagattttgaacgaactcttaaaggacatacagactctgtacaggacatttcattcgaccacagcggcaagcttctggcttcctgttctgcagatatgaccattaaactatgggattttcagggctttgaatgcatcagaaccatgcacggccatgaccacaatgtttcttcagtagccatcatgcccaatggagatcatatagtgtctgcctcaagggataaaactataaaaatgtgggaagtgcaaactggctactgtgtgaagacattcacaggacacagagaatgggtacgtatggtacggccaaatcaagatggcactctgatagccagctgttccaatgaccagactgtgcgtgtatgggtcgtagcaacaaaggaatgcaaggctgagctccgagagcatgagcatgtggtagaatgcatttcctgggctccagaaagctcatattcctccatctctgaagcaacaggatctgagactaaaaaaagtggtaaacctgggccattcttgctgtctggatccagagacaagactattaagatgtgggatgtcagtactggcatgtgccttatgaccctcgtgggtcatgataactgggtacgtggagttctgttccattctggggggaagtttattttgagttgtgctgatgacaagaccctacgcgtatgggattacaagaacaagcgatgcatgaagaccctcaatgcgcatgaacactttgttacctccttggatttccacaagacggcaccctatgtcgtcactggcagcgtagatcaaacagtaaaagtgtgggagtgccgttgattgtgtctccttcagcccctcctccctcttttcctctggatgcactctgatgataccatggttaccccattgagctctgtttaaataaatattgtcctttcatgtaaattattctggatgtagattgagcttattaaatgttacacacaaagtattcatgcatggtgaatccaaattgtatactgtaaatttacatacgttgtctagaagtaccatagggtttaaaaacctgggctggcattggtcacaccaggcctaagaaggcagaagttgaatcaattgaactagggcactaaactgaatagttgacagtgtcattttatgttggattattaattcctgtttttctttctgctatctgttggtgcctgacttgatggcctcatttggggaaaagtggtggttattagggctttttctgaaatgtgtatctatgtaacatcacttaagtgtgcttaataaatcttctgtaaggattttagatgataaggctacaattcagaatcttctgaaccatctatgtaatgaatggggattatacattggaatttttgtcatgacacatttgccaaatcagtaggatatatttgttttggcagcctatcacgcagaggctagtggtatatttatgtaagaaaatgactgtaaatctcaagaaaaatctcagcagctaatagcaactcatttatttcattttggtcttaatgctttgtaaacaggtcaaaaaatactgtcatactctaagcttctattttccacactggacatacttctagttgtattctccatactattagactgtgtagtgatgtgacttccaagtagaatttaatctccccattgagtgtgtcatggtacaaatcactattcgtttttggtgttttttagggatgtgcaatgtgcattacataatgacagaaatactgagaaggttctgtgtgcccatttgaaaggagtgggaggaatacagcagtttgtttttcaacatgaatctgatattgatttaaactgtgtttcacttacaagttttaaaaaaatgacagggtttaatggagcgtgcataaaaatgtactgttttcaccttttgtttatatgtaaatgtttgtaagtatatgggcctatctgtaagtgggtaagtctgtatgtgtgtatcatacacatcaacctccatgtccttagtcctgggtttttgaaaaagtgctaaaacggacaagtagaataaatgttgctgtggaatgccatgctttagaacaaaccctttttgatcttaatgcttctgaaaactaggtctgactctggggatttttttccagccgaaggaaaatcacttccgttatgtccccctctaatttagccgctcgacattttacacaacccggatatgttgtatattttgacccaaagttacaggtaggtttaagagaatttttagccatgacttttggagcactattccattgtcagttattaataaagaattccattgcttagctaaccaacaggttttttttgtttccaagagagttatttgaaaagttaacagaacaatgagataacagtgacagtttaacaaagataaaattctgaactgcgttttattcatttgtgtactatgtgattttttaaatgtcccctttagtatttaatggaaaattggttcctgcaaaagacaaagggtgagagttagcgtcctgtagatacacacagagactaggccgtatattaactagaagcagctttatgtctagcttgtgtctttttgtttgtttgcttgtttgtttttagattcctgagagatgtctctggaagggaaagttttgagaactaatggctatttttgaggacaaaaattacatcttaagctaattccttaaatacatacagtaggtgaattttcaggacaatattgcctcacaaccctgcttacattgaaaagtctttttcccttagctcttctgactggatttttctacaaaaactatggaaaatatctttgttcttgtttgctgctattttctgtcctattttgagaaatataaatacatagaaatggtgcatcttaacatttgtttgtacatgtataaatgtcttgtattttaattcatttttagcatgaattgtttaagggtaagccacaacatctagaaatcactcatagatattgaacaataaaggagaatggtaccgatgcaggaggaagcaagcgtgtcttcccctgcagcacacagcgacttgcgttgacaaaggaggaggaaacgattactctgtaaacaaagttatccttacttgggagattgccacagcctgctgctgagttgagttaccagacatcctccatgtgagaagcagcgaacattgaatctcagggatggcccacaactgggtccacatgtaatgagccctgtttaataacgaaggggtgggggagagcagtccgtctacaacctggaatcagatttgcaaaaatttcctgcactgctgtctgacactgtcctgttgatgccctttctgactgtgttctctgttttctctgtctgctgtctaaccctgtgccttgcctgggataaggacaatgatgaggttactggtttggattgtaagtagaggacttttattaattggtttagaggttcactgctgctttgtcactttctcaatcaaattggccacttaagaaataaagagctggtagaattgcatcctcagatgattattgactgtgtgtgtgtgtgaaaacagacattccagtgccacccaaatatatatctgtaacgtgcccaagaaatcctagctgcgctcttgagagtgcatgccatggagactggtttagacaccgcgtggagcctagttgcctgttgtcacggcatcttgcactttaggagactaagaccgtcctggttcgtctgtgtgtggtgtgaccaatggtgtgcccagagcactactctcaaaatcactagtgttagcaagtcgtcccgggctggggagcgttcgccgtagtctttggaagctttggctttagatttaccaagccccgcctccccgctgccagtgccctgctctcccgttcgcctctttctgtttctgtgtgaactttcccggtaatatcactcgttaaataggttttctttaaacttaattaaagaaaaactatttaaaggtaaaggatattttgttgacatcggtggctcgatcatccttaagcaactgaagttaaaattgttgaaggaaaaggcacttaaattggttactttcatgtccagctgtatataagtccagtgtgttcatctagatgacgcaaagaatctcctggtagagaagcgacatgtaaaaaactggtggaaaaaggttttggatttttttccagtggggtggggggagggcaagctggatttacaggtcacggctggactgaatgggcctttttatcttcccactgtatcatggaagtagctgcttgcttgtactgtccatccttcaggcatccctaaagctcactctgaagatgttagagacaaacacaaactcttcgagttaaagttgatcctgacactgacatgaaggcaagccttgatttcgtatgaacgttgctgaagtggtaattgaggaaaacagttccccagattgttaagagttcactgaagatattgacacaattttaaaaaatcagtaaaggaatgtatataatattgctctcgtgttttacagtaagatttgttgctctcagactgtgtaaaacaaaatttattcatgttttctgcatattaaaaaatcttattgtaccaactggtaaactattaaatgcctataaaactaaaaaaaaaaaaaaaa

SEQ ID NO: 28011 - DNA, 5402 bp, Homo Sapiens
agtgacgcgggcgctgcagccgtcgctaccgccgcgttctattctccgaagccggcgaccgccccacctcctccctccctcccgcccgcttcctctgcccacagcgccggccagagcgagctagacaagggcacgcggggcctcgcctagacccgagaagactgcgggcgcgcgcaagcggcggcgtggaagctgtgagcgcccccatcccggaggtctccgccggctcccgggtgaatcagctcccggccgactttaggattcttctgggttttaaattttttctttttaaaaaaacttggacggataaaagatgtgccatggcaggatagcaccaaagagcacctcagtgtttgccgtggcctccgtgggacatggagtgttccttccgctagtgatcctttgcaccctgcttggagacggacttgcttccgtgtgccccctaccaccggagccagagaatggtggctacatctgccacccccggccctgcagagaccccctgacagcaggcagtgtcatcgaatacctgtgtgctgaaggctacatgttgaagggcgattacaaatacctgacgtgtaagaatggcgagtggaaaccagccatggagattagctgccgtctcaacgaggataaagacacccacacatcacttggggtccccacgctgtctatagtggcttctactgccagctccgtggcgctcattctcctcctcgtggtgctgtttgtgctgctgcagccaaagctgaagtctttccatcatagcaggcgtgaccagggggtatctggggaccaggtctccatcatggtggatggagtccaggttgcactaccatcatacgaggaggctgtatatggcagttctggtcactgtgtgccacctgctgaccccagagtacagattgtgctgtcagaagggtctgggcccagtgggaggagcgtgccaagggagcaacagctgccggaccaaggggcctgctcctctgcaggtggagaagatgaggccccaggccagtctggactatgtgaagcctggggctctcgggcctcagagactgtgatggtgcatcaggcaaccacctcttcctgggtggccggctcagggaaccgccaactggcacacaaagaaactgcagattcagagaacagtgacatacaaagccttttatccctcacgtcagaggagtacacagatgatattccactgttgaaagaagcatgagggcagcggccagcctttcctctctgcgaggttctctcagcccttcctccctctccctgtgggattgagcaccctgtactctccagccaccttacctggatacctgagctgccacctgtgtatctgtgtatctctgagggccctataggcccaccttgctggaaactcaaggaagattctcgccatctgcctgttggacagctggaggagctggctctttgcctggccccgccttcccatctgtcagagacatatttgaatgtgctggatcaaaccctcccttttcctaagcctctgggtcccctccagccagctctttggcggcagcccccaccagctcctgtgggcctgagtgctgctgtgtttacttgtgcctttcccccaccctgtccagtttccctgtcatgcagacttgttgctgtccacaagccttagtggctgcactgctgccccctgccacacagggggccgggcctgggtctgtcctgtttcctttgagggttgcccctactgccctttgcaggaacagatccaggtgtgagagctcttgagtcaagagtggcagaagtggctctaattggggtgagagtgtagtccctgggcttgccctgggttgaccctggtggcatatttccttggccgaggatggaagatttggagaatcatgtccatgctggcccaggacccagccatctggcccaaaggcacaagctcctggccctgttgagttgagagtttccaagaagcatccagaagatcccaagggagagaaggaaaatggctgataatgattgtcttcctaatatgcaagttctcacttcctacttccagcatcggccttcctggccttgtcttttttttgtttccctggagtataatgggaagttgcatgctgcctcctgggttttatcccagatagctctggctttcttgctgcccacaggggcctggggcaggaaggagacttgctgagatgccatggagtgcccatctggtcactggcagtctgggcaggttgcccctttctgggtttgtggtgacggaggggaggccgagaggcacagaccaagtccccgggtggctgcaggcagctccagcccggtcctgaggatcctcctcaccatggtcacgtgccttagtaactgtgcccaggaagtggcctgctgcttgctgtgctgctgcttttcctacttctgcccttccctgccacccctcgcatgtcacagctgacaagcaattccttgtcttccctggccccctgggggaagggctgagaaacagtccatgtgcaccccaaccttaatggcctgaggtgggcagaggggtgtggagcagcctggagtacagggccctgggggaggagcccactgatgaggggcgctctcccatagccatgtgttgaatgctaactaggctggggtggacgaactctgccaactgctgtcatcttagaagatagatgcagcagtaaggaatgtttgttttgcttttttctgaaattttctgaagcactgtggctgggaaacttcgaagcggaccctgtgctgcatgtctgctcctcccctgagcctgtctgcttgggggtggtaaaaataaaaatcccagtttattttcagtaccttacctaacagggttggctccaggcgtgggtggcctagaagatgaggggagtggtcttctcccagccttttaccctcttgcctcctgcctccgcgcttacacacgcactttaccacccggtcattccctggcctcttgctgccacttgtagtcttccttccttcctctcagggtaagggcagtgcctgctgtgcctgttggccactcccacacttcccctcccccaggagccctcatctgctgtgctgagtccaggaaagcatagttaggtagggagctggttggagaaggtgctagaactagaaggcagatgagactagcatgggcccacctggagggctgtccctaatggccccagtcgccttacctcacccacagcagtgcccttgtcttcctccaaaacagaaagcagtgacaaaagggggaggggtggtaatctgaagtctcactgctgagccttcagcttttatttttcactgtttcaaaacccgcattctattctagaatggtttttaaaatggaagatcttacctttttctatcttgttactctggggttttgtccccctaagagattgcactttttgtttggggtttattcagctgcatagatgaccagcttgatccctggtgaaatgaaaagccttccttctcctgaagcctctttccgccctgccctccactaacaacactgaggagcacaagcccaggcttgcccacctggtaggaaaggaagaaattagaacaatgggagccttggctcccctctcgtctcctcccctccttcttgtcactggctttgatgaggcccacttcccagaggctcctgggcctgtgagtgcaggagctcattctcccctcactgctgaagtctgtgacagcttcttcctccagttatgtctttcttccaaagcaatttcttaaccatcagccatgtgctgctatttctagggcttctgggctttgtcccttactgagagattagggactccacagctgccttgaggtagggcctggctgagagacaagggtagcagcaggtggcaggctgttaaaagacaggctgcctgaggagcctggagcaggtggaaacaggtggaagaaaccggccacagccctgctttaccgggctcacctctagggcattccagcaagaggctgatgcaggagaatggccagcaccaaaggacatttaaaagagtttttgggtttttttgtttgtttgttgttggtgtttgttttttttttttttttttggcacacttgagctgactcagtgcaggtttaatatcctggtgacttgcagtcacattctaatgactttcaagggccagaatatggtgaaaatcacttaaaatatccgtcccttccatgccttagtttagcaggtaggctctatcttttgccatttctgtattttatgtgctgtgttcccgtttcactgggtatgaactgtgaaatggactgaatcctggccactttatgagtttgtttggttttataaggcatttcaatgtacattctataaatacaagcactccatttgcaaacagatcttaagctaatattttctttcccattcatcttgccctccccctcctcccgccagctttaaagttcagtggagaagccagatggcaattcagacaaaggtatactcttcctgcttcatgggtggtggcacgggaatagatagcccttagccctttccctcccagtcccagctgagccctcagaccacttgcttcccacataacaatgtcgcctccatttccgaggaacatccttgcgtagagaatgaaatatgctgcaatcatttctgcatccttactcctcacccccaaagaaaaaaaaaaggcctagcagggaagcagcatgcaggcttcacagcttaatgccaaggacagcgagtgaggctgggagcttctcttgggcctgctgggtctgtcagctctcggaatagggacagtccttactggtgccccaaggtgggacttggagaatattttgcttggcatatgtttggtctgaatggtgtagttgctggttccctagagaggaaaaggtggcaggcccagctttgctgggaaatggctcttaatttccagttgaaaccctagtagaattgtgaatgaaaacctcaaggttgagcccctctgccaagcagcagagctagtagaaggggatgcaggggcaaagcactcagttgccaagcaaggaggagagatgtacgtgggctgtgtggcagtccccacaccctgccctggcttcttcaggttatcgcaccactatggaatcctttgcagaatggtactcatataatggtttaaaacaacacattcataattgactctgtgcaggatgtcactcaatcagtttgggtttgctttattttattttatatatatattttttggtatcctgtacattgcagtgggtgtgaagatagtattttaatatttgtacaaagtttaatttaattttaattgttctatgtatataactgcatttctaaataattaaaaaaaagttcttatgaaggcaaaaaaaaaaaaaaa

SEQ ID NO: 28012 - DNA, 5966 bp, Homo Sapiens
attggcgtgtggaaaatgccaccagatggcgggttaggattgcagctccgttgaaggcgcggcccccgctcccgaacccccggcgaccaccccgtaacaacccccccacatcgggaataacacaccggagacttttggggggaaactaggtcgatggtcggcggcgcccggatgggcagctgaggattgcctttgaggttattttaaaagttttgagttgtacagcacttgattattttgctgcattgtgaaaggacctctccagcaatgattacttcagaattaccagtgttacaggattcaactaatgaaactactgcccattccgatgctggcagcgagcttgaagaaacagaggtcaaaggaaaaagaaaaaggggtcgtcctggccggcctccatctacaaataagaaacctcgaaaatctccaggtgagaagagcagaattgaagctggaattagaggagcaggccgtggaagagctaatggacaccctcaacagaatggggaaggggagcctgtcacattatttgaggtggtgaaactggggaaaagtgcaatgcagtccgtggtggatgactggattgaatcatataaacaagacagggacatcgcacttctggatttaatcaacttttttatccagtgttcaggatgtcgaggtactgtgagaatagagatgtttcgaaatatgcagaatgcagaaatcatcagaaaaatgactgaagaatttgatgaggacagtggtgattatcctcttaccatgcctggacctcagtggaaaaaatttcgttcaaacttttgtgaatttattggagtcctgattcgacagtgtcagtatagcataatttatgatgagtatatgatggacacagtaatctcccttttgacgggtttgtcagactcccaggtcagagcttttaggcatacaagtaccctggctgccatgaagctcatgactgctctggtgaatgttgccttaaacctcagtattcatcaggataatacccagagacaatatgaagccgagagaaataaaatgattgggaagagagccaatgaaaggttggagttactacttcagaaacgcaaagagctgcaagaaaatcaggatgaaatcgaaaatatgatgaactctatttttaagggtatatttgttcatagataccgtgatgctattgctgagattagagccatttgtattgaagaaattggagtatggatgaaaatgtatagtgatgccttcctaaatgacagttacctaaaatatgttggctggactcttcatgacaggcaaggggaagtcaggctgaagtgtttgaaagctctgcagagtctatataccaatagagaattattccccaaattggaactattcactaaccgattcaaggatcgcattgtatcaatgacacttgataaagaatatgatgttgctgtggaagctattcgattggttactctgatacttcatggaagtgaagaagctctttccaatgaagactgtgaaaatgtttaccacttggtgtactcggcacatcgccctgttgctgtggcagctggagagttccttcacaaaaagctatttagcagacatgacccacaagcagaagaagcattagcaaagaggaggggaagaaacagcccgaatggaaacctcattaggatgctggttcttttctttcttgaaagtgagttacatgaacatgcagcctacttggtggacagtttatgggagagctctcaagaactgttgaaagactgggaatgtatgacagagttgctattagaagaacctgttcaaggagaggaagcaatgtctgatcgtcaagagagtgctcttatagagctaatggtttgtacaattcgtcaagctgctgaggcacatcctccagtgggaaggggtaccggcaagagagtgctaactgccaaagaaaggaaaactcaaattgatgatagaaacaaattgactgaacattttattattacacttcctatgttactgtcaaagtattctgcagatgcagagaaggtagcaaacttgctacaaatcccacagtattttgatttagaaatctacagcacaggtagaatggaaaagcatctggatgctttattaaaacagattaagtttgttgtggagaaacacgtagaatcagatgttctagaagcctgcagtaaaacctatagtatcttatgcagtgaagaatataccatccagaacagagttgacatagctcgaagccagctgattgatgagtttgtagatcgattcaatcattctgtggaagacctattgcaagagggagaagaagctgatgatgatgacatttacaatgttctttctacattaaagcggttaacttcttttcacaatgcacatgatctcacaaaatgggatctctttggtaattgctacagattattgaagactggaattgaacatggagccatgccagaacagatagtcgtgcaagcactgcagtgttcccattattcgattctttggcagttggtgaaaattactgatggctctccttccaaagaggatttgttggtattgaggaaaacggtgaaatcctttttggctgtttgccagcagtgcctgtctaatgttaatactccagtgaaagaacaggctttcatgttactctgtgatcttctgatgattttcagccaccaattaatgacaggtggcagagagggccttcagcctttggtgttcaatccagatactggactccaatctgaactcctcagttttgtgatggatcacgtttttattgaccaagacgaggagaaccagagcatggagggtgatgaagaagatgaagctaataaaattgaggccttacataaaagaaggaatctacttgctgctttcagcaaacttatcatttatgacattgttgacatgcatgcagctgcagacatcttcaaacactacatgaagtattacaatgactatggtgatattattaaggaaacactgagtaaaaccaggcagattgataaaattcagtgtgccaagactctcattctcagtttgcaacagttatttaatgaacttgttcaagagcaaggtcccaacctagataggacatctgcccatgtcagtggcattaaagaactggcacgtcgctttgcccttacatttggattggaccagattaagacacgagaagcagttgccacacttcacaaggatggcatagagtttgcatttaaataccaaaatcagaaaggacaagagtatccacctcctaatctggcttttcttgaagtactaagtgaattttcttctaaacttcttcgacaggacaaaaagacagttcattcatacctagagaaattccttaccgagcagatgatggaaaggagggaggatgtatggcttccactcatctcctatagaaattcattagtcactgggggtgaagatgatagaatgtctgtgaacagtggaagtagcagcagcaaaacctcatcagtaaggaataagaaaggacgacctccacttcataaaaaacgagtagaagatgagagtctggataacacatggctaaacaggactgacaccatgattcagactcctggccccctgccagcaccacaactcacatccactgtactgcgggagaacagtcggcccatgggagaccagattcaagaacctgagtctgaacatggttctgaaccagactttttacacaatcggggtctaatggaggaagatgctgagcccatctttgaagatgtgatgatgtcatcccgaagccagttagaagatatgaatgaagaatttgaggacaccatggttattgatctgcctccatcaagaaatcggcgagagagagctgagctaaggccagacttctttgactctgcagctatcatagaagatgattcaggatttggaatgcctatgttctgaagtctgaagaaaatttacaaatctggaactctattatttagagctagaggcctatatactgtgatagcttgtatggggaaaaacacttttgatgtgatctgatttgttttttaatcaaatgattaaggtcaatccctttttgcagtgacagaagaggagcatgtaaattacccaagggaatgttggtgaatgtcaactcagaaagactgacctgaaaatcatttgtgtcctactgttggacttatcccaatacagatgtgtgtgtttttctggagggaggaagaaattttaaatttttaaaacagctgtcaagataaacactgttatacacctgttttatgaaaactcaacattgagtaaaaaaaaaacatatttttaactttattttcctgttgtacaatttaaaaaccgttttaacattttgcctttttatgttttaaaagctaaccatttttattaaacctatgagtaagcagctcatcctaattgcgaagagtgttttggagttcactggatttggttgacctttgtggaacacaaataatgaaggagcagaacattgacaagctaagatgaaattctgacatagtacatctctgccaaaaaccacacaccctctgtggatatggatatgaattcccagattttatatactcttgaataaaaggtttatttttatttataagtgggcataaaataagaaatgtccatgcagccatttttccaacagatgctgtacaccgttcattttatatagactagggagattcaaatacagtgcattttctattggtatttgttctgtgcatttttagcaacttctaccagcaaataaagtattctcagtaaaacgaaaatgattctcaagttatcagtttgctgtttttaccacttatttcatgccctgccaaattcaagttacacagacttccattttcttaagataatcaatcatgaagaaatcctttatcaatcattcaaaagtaattttaagtgtaacataactgtgtttacttcccatgcacttaatacccttatgcgctaattttgtgaattaagtttactgattatagaagtatgtgctgcatagaagtctgttcttagagggtgaagttcctaagcttaccttgaattacagctacatttcagtgttaaatgtgcatattaagaataattcttttggggaaagaaattatgaatcttcaggacagtctacaatggtttagagttacattctgcctagacttttatgacttgctgctattgttttaaaaaccccacttagtctcttcctttctgatttctaaagtaagcctcagaatttccaaaccaattcatccacagctgtttctgggctggtttttaaagtagctgcaacagaatcatgaggctttccctttttatcaaatacgaaaaacattttttaaaattctgcacacccagtgatcatcttttgtgcgggaaagcaagatgatgatggatgattttattcatccttttagtaaagacacaaaacatttttctcaacatttgtacagttctgaaaaaaacctggtcaccaaaaatatcttctctgctaattcagcaattcttgggctccagttaggggagctggggcctcactttctcccagaattgtgggcttcactggaagtgaaggtgcaggaatgactggactgtccaccccagccctgcctgcctgtggttttggccagggagcaagccatgaggtgccctggcacacgcacaaattgatcctttgcgtgacagtcttgtatggaaaacagatgctgacagaattgtagactaccatgccacacaaaaaggctaaatatctactccaatgggtttccagttcagtttgaagtcaatcaaatttttgtattttcggtgtctccttgattggttttgctagtaattctgtaaattgtacatttgcaatatgaggttttttttccttttgtacaatttgaaactgatgcttcacctttcctttaataaactattcaaaatcacgaaaaaaaaaaaaaaaa

SEQ ID NO: 28013 - DNA, 3829 bp, Homo Sapiens
cggctgccgtgagctgactgacgttccgggaacgccgcagcagcccgcgccgcccgcagcctagccgagccgcgccgcccgggcctcgcccgcccgcctgcccgccatggtgtcatggatcatctccaggctggtggtgcttatatttggcaccctttaccctgcgtattattcctacaaggctgtgaaatcaaaggacattaaggaatatgtcaaatggatgatgtactggattatatttgcacttttcaccacagcagagacattcacagacatcttcctttgttggtttccattctattatgaactaaaaatagcatttgtagcctggctgctgtctccctacacaaaaggctccagcctcctgtacaggaagtttgtacatcccacactatcttcaaaagaaaaggaaatcgatgattgtctggtccaagcaaaagaccgaagttacgatgcccttgtgcacttcgggaagcggggcttgaacgtggccgccacagcggctgtgatggctgcttccaagggacagggtgccttatcggagagactgcggagcttcagcatgcaggacctcaccaccatcaggggagacggcgcccctgctccctcgggccccccaccaccggggtctgggcgggccagcggcaaacacggccagcctaagatgtccaggagtgcttctgagagcgctagcagctcaggcaccgcctagaatccttcgatctcgcttcaggaagaaaagtacctcatcctcggccaccgaaaccacgtgagtgagatgagccaacagcaccggatccacagaatgtttcttctctgccttaaagagctattcactaataacatagaaatccgcaagctgggtgtgctttgagtgtgcagcctcacaaacatggccttttctctctccccttccacttttaaggatttatttttttcccccttttctttattttgctggggagaggctaaagggaaaggtagtaggggcgggggtggtgacctttaagtcttctgaggttggtaattttccacaattggattgtcattatagacagcagtgtgttttttagaaagataagagaatcacccctatgctgctgagatgtacatttgtaatttatctgttgcatacttagtttttagtcctgtaaatgcaaacacagcattttttacaactttctttgttcttggtacttatactttgaactatgatgtacatatttatggcttttggcttttaatataatggacttgcaagggctgccagaggttctgatatgtaagaaaactgcaaaaacaaatatagacaaatattttgattctagagaacgtctcagatgtgcttataaagcttccaaatacaactccagtaagacatccctttccctgcaggagtgtggtctatattctttagatagttgtttagtcaaaagaccagacaagttacaaactaagagaaacaatatttcacaacacagtaaagtgtgatgagaggtcaggggaacatcccagtaaaagagaagagtcacaggaagctcatctcctccctggattctggattaggagcttctgaatcttttccagggataggcaggtagctcactcttggtgcaatttcttgaggatgggaacatgtagagctgctggaaggagtaattctgtgcttgacaaaggacgatttctcctttatcgtgaccagtgctgccgatttcctgacagaggagcttacactctgagcaccttgttttagcgaactctagcaaaacttgtttagcttagcaaaaacaaacacacaaaaaactgagaactctgctgtttcagatatgccataacatacatctgaaacacatgtgtaacaatcaaaatggtgggctctagaatggttttggagctcgagatcttcatgggttagacttgctggtcagacccaggagcacctgtggctcacaccttctgttcccctcctggcctgtgcagaatgtaaacagcagactcatactcaatgggcactacaggccttatcagacgttttatacaagcctggattgcttagtaggggaataaggcattctctgagggggctttccacttagattgagaattttatttgaaaagaatctggtttaaatggcattgtggtccgaggtagctgctctccccactgagagctgagccgaaatataagaataatatatttgtgcttcgagttggtgtttctttcagtgtaatgcatgcagtggtcacaacccagttactcataatatttggattgtatttgttcgtagatatgcccagaagactagagaattagtgttatataccatatagaacttactgtcagtcaactataaacaggcccaattaaaaactgttccattactacgcaaacacatattagaggcctttgctgatgacacattagctggatcttagccaccccagaaagggtttgatttgaagctgattgttgccagatatgcatattggaatcccatctacccatagttcctctgaaggtgattttgtaatttgcaaaagggtataggaaaatatacctaaaagcgaatttgtggctgagaggataaacagaagctgtttgctcatgttctgtgccccacacccaccaatacctaaatctgttaaggaagacagaaaatgttttctttgtgctcattgagtagttccagacagaagaagaatatactctttaaaatgtatttacctgttagttggaagtacccagaattatcagaaacgaatgcaaaaaaaaaaaaaaaaaaaaagcttacacagcttcttagcaattttttttttttttgccgaaacaataaattgcctttagcagcagtttaaaatcctatcgtgaacaacctatattttcgccattttacaatggagagttgtgacaagtacaggttatcaagtttgcacttaactatgccaaaaaaagtttgaagcgctctattctcagacatgctgtattattacttctcattcaagattgaaaaatataaaggtatccaaactctgtcttaatgtaaatgtaactatttttccttcaagtgttgactagggagtcggtttctctcttaaagacactcactgtacaactgaaagcagctgtcatatttctggcaaaatgtgtttacgtatctgacaagttgtacatttgtgtatgaactgacataaaatgtgaaagcctgtaagtgtacatgtagtggtgtggtgttctgtctagaggatacaactgaatgtttttaatttgctgacttacagacacaggctgtttacaaaatgctagctggaaagtctgtaatgttcatgtcataacttttagttaattgccattgagcacctgttctgaggaggtgagatgtggacttgtgcttataaactggagagtttagtcataatccctcctggctttgtgtgaatagcttgctcactttgctggcctttgaaatgtgttctccgtgataagctatccatgtgtttgtgataagagtgcttgtcaaccatgaccatctttgagccttcctagtcctccacctggcacagtatttgaaatggcaaaggatgtgcttcatcctctaacagtgtacactcccagagctgatattctggattttgactgtgcacatttcctctagttcatgtctgtagtccctatagaatgatctgtaataaaatagtatactggactgtgcatcaaagggatgtaaaattacagtattccaaaggttgaagttctgctgttttgttataatgcctgatacacatcttgaataaagtcttaacatttttcttttaaaaaaaaaaaaaaaaa

SEQ ID NO: 28014 - DNA, 2566 bp, Homo Sapiens
ggcacctcccagccctctgcagctgcccgggggcaacgtcaccatcacttacagctatgctggggccagagcacccatgggccagggcttcctgctctcctacagccaagattggctgatgtgcctgcaggaagagtttcagtgcctgaaccaccgctgtgtatctgctgtccagcgctgtgatggggttgatgcctgtggcgatggctctgatgaagcaggttgcagctcagaccccttccctggcctgaccccaagacccgtcccctccctgccttgcaatgtcaccttggaggacttctatggggtcttctcctctcctggatatacacacctagcctcagtctcccacccccagtcctgccattggctgctggacccccatgatggccggcggctggccgtgcgcttcacagccctggacttgggctttggagatgcagtgcatgtgtatgacggccctgggccccctgagagctcccgactactgcgtagtctcacccacttcagcaatggcaaggctgtcactgtggagacactgtctggccaggctgttgtgtcctaccacacagttgcttggagcaatggtcgtggcttcaatgccacctaccatgtgcggggctattgcttgccttgggacagaccctgtggcttaggctctggcctgggagctggcgaaggcctaggtgagcgctgctacagtgaggcacagcgctgtgacggctcatgggactgtgctgacggcacagatgaggaggactgcccaggctgcccacctggacacttcccctgtggggctgctggcacctctggtgccacagcctgctacctgcctgctgaccgctgcaactaccagactttctgtgctgatggagcagatgagagacgctgtcggcattgccagcctggcaatttccgatgccgggacgagaagtgcgtgtatgagacgtgggtgtgcgatgggcagccagactgtgcggacggcagtgatgagtgggactgctcctatgttctgccccgcaaggtcattacagctgcagtcattggcagcctagtgtgcggcctgctcctggtcatcgccctgggctgcacctgcaagctctatgccattcgcacccaggagtacagcatctttgcccccctctcccggatggaggctgagattgtgcagcagcaggcacccccttcctacgggcagctcattgcccagggtgccatcccacctgtagaagactttcctacagagaatcctaatgataactcagtgctgggcaacctgcgttctctgctacagatcttacgccaggatatgactccaggaggtggcccaggtgcccgccgtcgtcagcggggccgcttgatgcgacgcctgtgagcaagagcctgaggaagtagcagagaggggtgtgggcccatgtgcagttctgggaccctggcaccttggctcagggaagacccgagctcctttcactgcagaccctctccagagactggggagagggctctggagaacctggttcttgcttactgttctccctttgggccctccttcccaaacgcaaacaatccaggatccactcagcgtcaggcccaatggaaatagtgaagcagtgattttccctcccctgcctctccatagcctggtcttttgccctctcctttgctcttctcttcccccatagccacctcaaatacctgcagcctgatatcttcatcccttcatccagaccttttctctcctagtggtattgcaaactgaaagtggacaaagacttaaggtaaacctgctcctcatggtggaatgcttccaaatgctggaaggaggactttagggcagagttcactaaggaggcttgtgcttatagatcagtgggcctgaaagaagtttctctaggttctggttgtgtgctgtacgaggtgtaggtagtaataatactcttgtcagccacagtgaagccccaagctagccgggataggggactgaccttgtacaggcagcatggagaaactaagacagagtgtcctgcccaagtgatggcactggggagcagtcactcaggtttatttccaccagggcccaagaaaaaaagaaatgaggcaacctaaaattccatcaagatagataccaatatccaaggtgcttggtcttagcggtgtgggacccacgttaaggctcttggtgggaaggtgggaggtgttttcagcatgagatagggttcaggctgtgaatcagagtctagagcctaagataaaagaagataccagggctgggccacggtggctttcgcctgtaatcctagcactttgggaggccaaggcaggcagactgcctgagctcaggagttcgagactagcctgagcaacacggtgaaaccctgtctctactaaaatacaaaaaagtagccaggtgtggcggcatgcacctgtagtcccagctactcgagaggctgaggcaggagaattgcttgaacccgggaggcggaggttgcagtgagtggagatcgcgccactgcactctagcctgggtgacagagcgagactccttctccaaaaaaaaaaaaaaaaa

SEQ ID NO: 28015 - DNA, 2709 bp, Homo Sapiens
ctccaagatggctgcctccatagtgcggcgcgggatgctcctggcgcggcaagtggttcttcctcagctctctcctgcaggtaaaagatacctgctttcttcagcctatgtagacagccacaaatgggaagcaagagaaaaagaacattactgtcttgctgatcttgcatctttaatggataaaacatttgagagaaagttgcctgttagttctttaacaatatcacggcttatagacaacatttcctctcgggaagagatagatcatgcagagtattacctttacaagtttcgacacagccccaactgctggtacctgagaaactggactatccacacctggattaggcagtgtctaaaatatgatgcacaagacaaagccctatatacccttgtaaataaggttcaatatggaatttttccagataactttacattcaatttactgatggattctttcataaagaaagaaaattacaaagatgctttatctgtggtttttgaggtcatgatgcaagaagcctttgaagtgccttccacccaacttctctccctctatgttttatttcattgcctggcaaagaagacagacttcagttgggaagaggagaggaactttggtgcatcccttttgcttccaggcctaaaacaaaagaactcagtgggtttcagttcccagttgtatggctatgcacttcttgggaaggtggagttgcagcaagggctacgggctgtgtaccacaacatgcctctgatatggaaaccaggctaccttgacagagcccttcaagtgatggagaaagtggctgcctccccagaagacataaagctgtgtagagaagcgctcgatgtgctgggtgcagtgctgaaggctctgacttcagctgatggggcttcagaggagcagtcccaaaatgatgaagacaaccaggggtcagaaaaactggtggagcagttagacatcgaggaaacagagcagtccaagcttcctcaatacctggaacgatttaaggccttacattctaagcttcaagctctgggcaaaattgagtcagaaggtcttttaagtctgaccacccagcttgtcaaggaaaaactctccacctgtgaagcagaggacatcgccacctatgagcagaatctgcagcagtggcatctagaccttgtacagttgatccagagagaacagcaacagagggagcaagcgaagcaggagtaccaggctcagaaagcagcaaaggcatctgcctaatagggtcccccagggccccacctgtctcacaagaacttcactcaaccccgtgccaggactcagcagtggcctggacaacagcctcagcttcctctacccatcttcttttcttaaagcaggctatgtgccctacatggcaaggcaccatgactgcccatcgagatgccaagaagggctatggaactatgcaggtggctagtggtcagactgaagtcaccagctgaataccttaaggaggactcttgaggctcataatggagttcctggggcacagggattagttatgagcattaaagttcctaagacccagtgacagtactgggagaaaccaaggctgaagagtcaggttgaagcacaggcttttgttttttgttgtttttgttttttgagacagagtctcattctgtcacccaggctggagtgcagtggcgcaatcttggctcactgcaacctccgactcccaggttcaagcaattctcctgcctcggcctcctttagtaggtgggattacaggtgcataccaccacacctttctaatttttgcatttttagtagagatggggtttcaccatgttggtcaggctggtctcaacctcctgacctcaagtgatctgcccgcctcagcctcccaaagtgctgggatgataggcgtgagccaccacacccggccaagcacaggcttttgaatggtctccctctccccagcccaggtacatgaggccaaggtgaactgtgcatcctgagaccttgtgtccctgagtctcctttctgagtgcaagctgcactgtgagctggctgtgggatactcacacattcccacattctcctttctgccacatctcgcccttctggacctgcactgggagaaattcaggacaggagtgaactcaaggccatgaactcactggatttccatttttaggcacccatagggatgtttttaggatgtaagtttctgaggagaaagctagctctagcatgaagcttttttggattggcttctccatcgtgttggggtaacattttttttccaattttttttttcccaaaacatcgtctcagctcatttatcaagtaggtaaaatgagccttttgtgtacacacagaggcacatgtgcacgcacacacaacttgtgaacacacatttctgttaaagaagttagaaaatgagagatgggttggggcttgaagtgcatcagaggtatgaatgttgtaaaactgtcaggagatgtaaaattcctttctgaagtgtctcttctgtgaaagggttcagagcagattttgcttactatgtagtgttgcccttaagtacagtggtgtaattttattcaagattgtgctcttctatcaaaagcctctggaaataaatgttccgggatcaaaaaaaaaaaaaaaaaaaaaaaaaaaaaaaaaaaaaaaaaaaaaaaaaaaaaaaaaaaaaaaaaaaaaaaaaaaaa

SEQ ID NO: 28016 - DNA, 2352 bp, Homo Sapiens
gcttggaagatggctgcgccctgtggctcggagctgcccgccaactcgccgctaaaaattccgaagatggaggtgctttccccggcttctcctggtggcctgagcgacggaaatccatcgctgtccgacccttccacgcctcggggtgcctccccgctcgggccgggcagtgcggcgggctcgggggcagcggcgtccgggggtctcgggctggggctggggggccgcagcgccgcctcgtcctcggtctccttctcccctggtggcggcggtggcggggctgcggcagccgccgccgccgcctgccggggcatgtcgtggacgccagccgagacgaacgcgctcatcgcagtgtggggcaacgagcggctggtggaggcgcggtaccagcagctggagggagccggcacggtgttcggcagcaaggcccccgggccagccatgtacgagcgcgtgtcccgggccctggccgagctgggctacgagcggaccccgtcccagtgccgggagcgcatcaagacccttcgcaggtgttacagtcgggtgaaagaacatggtgttgggaaaagaaagagcagttacacatttgaacagttggaacaggtgtttggtcagggaggatgggatgctcagccctgccagcctgtacttattaacagtagtggcttgtaccaggagctggagtcagatggcagcactatggaggactattcacaggaggactggggaaaccacagtcaggatctccatggctatccaacagatcaggaattggatgaaatacctgtcacaaagagaacattaaaaataaaacaagagtcttctgaagaagcacagaagagagacatcatgcagaatattgtacagattttggaatcggtacagttgaaatgggaactttttcagagctggacagacttttcaaggctccatctttctaataaactggccatttttggaattggttataacacccgttggaaagaggatatccgttaccattatgctgagatcagctcccaggtgccccttggcaagcgacttcgggagtacttcaactctgagaagcctgaaggacggatcattatgacccgagtgcagaaaatgaactggaaaaatgtttactacaaatttttagagatcactattagcgaagctaggtgcttggagctgcacatggaaattgactggatacccattgcccactccaaaccaactggtgggaatgttgttcaatatttattgcctgggggtattcctaaaagcccaggcctttatgccattggctatgaagaatgtattgagaggcccctctcaccacacatggagcaaagttccctggacccaggaaaagagggccgggttgacctggaaaccctttcagcacaagcctcattacaggtggaaatagaacccacccgaattatctattgctacctcgggattgctgaggtcaggactctacagcagtgcttatttttacatttccaagcgaataccaaaaccttcagcaaagattgggttggtattaacgggtttttgtctcagaactgtattgtggatcccggagtttcccccaaatccatctacatcaaatttgtagaagtagagagggattttctttccgcaggctctttagttgagtgcctggaaaaagccattggataccccttaaaatttaacaactgaatgtcatccttcataaggatttgggctcttagctccttcttctctactcacttcccattacccggaccacccctcatccagatgccgccgtcagactcttcatggaaaccctttcttcaattgggccagtacgacttctaaggaatcatagtagacttgggccagaaaaaacagacctcacctgaaaatgctcattttgagcaagcaagatatatagcgaacttgcatggtgggtcagctatttcttttttaaaaacagaaaaacaatttttaaatggattttagagccctaatataaacaaatgtaggtacattccatattggacaaaacttatactttgagtttcatatgaaattgaaaaattgtatttttttcacaatgtttcatttttacacatctctatgtctctatataagtaatatttataaccctgaataaataagcaatagataatggcaagttaaatcttgattcacagttaaaaagactttttcaatatcacccttagctactattgtatataatttagattttcatttttttcaccagccaagtgttttgctatttccaatcagtattgcttgcaaagacctttgtttctgtgatgtaccaactttacagttgtgttgccatttaaacctttttttaaaaaaaaaaaaaaa

SEQ ID NO: 28017 - DNA, 2157 bp, Homo Sapiens
gccggctcctaccctgaaggtgcacctgcaatcctcgccgataagaggcagcagttcggaagccggttcctgagcgatccggcgcgcgtcttccaccacaatgcctgggacaatgtggagtggtcggaagagcaagccgcggcggcggagagaaaagtccaggagaacagtatccagcgggtgtgccaggagaaacaaattgattatgagatcaatgcccacaaatactggaatgacttctacaaaatccacgaaaatgggtttttcaaggatagacattggctttttaccgaattccctgagctggcacctagccaaaatcaaaatcatttgaaggattggttcttggagaacaagagtgaagtatgtgaatgtagaaacaatgaggatggacctggtttaataatggaagaacagcacaagtgttcttcgaagagccttgaacataaaacacagacacctcctgtggaggagaatgtaactcagaaaattagtgacctggaaatttgtgctgatgagtttcctggatcctcagccacctaccgaatactggaggttggctgtggtgtgggaaacacagtctttccaattttacaaacgaacaatgacccaggactctttgtttattgctgtgatttttcttccacagctatagaactggtccagacaaattcagaatatgatccttctcggtgttttgcctttgttcacgacctgtgtgatgaagagaagagttacccagtgcccaagggcagtcttgatattatcattctcatatttgttctttcagcaattgttccagacaagatgcagaaggctatcaacaggctgagcaggcttctgaaacctggggggatggtacttctgcgagattacggccgctatgacatggctcagcttcggtttaaaaaaggtcagtgtctatctggaaatttctatgtgagaggtgatggaaccagagtttacttcttcacacaagaggaactggacacgcttttcaccactgctggactggaaaaagttcagaacctggtggaccgccgactgcaggtgaaccgagggaagcaactgacaatgtaccgggtttggattcagtgcaaatactgcaagccccttctgtccagcaccagctaagaggcacctgctgccaacacgatgcaagcccgttgtgtttccgagcttttttaaaaaaaaatttgtagcaccgggcatggtgcatgcctgtaatcccagccactcaggaggctgaggcagggaggatccattgagcccaggagtccagcctgggcaaaatagcgagagaccctgaatctgaaagtaatgataaaataaaaagaatataaatgaggtctcgttgatgctggacaattcaagaattcagacttgaaccttaaacctaggaaaagttactttgtatcaggattctaacaattatgcttcatatttgtgaagtcctttaaaacataattttctcaagttctttctttgagacctcaatctgtcttagcattttgtaactaataactgaaattttattcaaaggaattgtaaaccttaaaccaccaatttatttccatgtgaaaaagtgttatatatgacaagtgttttttgattgtaattgcgttaaatcttttgagagtgtaaatgccgggctaggcaattgcagttaatacatacaggggttagtgaagggcttattaagttgtaggggaagcaagctgggaagaatcagatcagatattttcctgacaaaaaaaaaatgaccctgtagacagcatcaaaatgtggtgttcttgttaagtaattgatcgtggtctttgctttaatcttagttccgccaggcacggtggctcacacctgtaatcccagcactttgggaggccgaggcgggcagatcacctgaggtcaggagttcgagaccagcgtggccaacatggtgaaaccccgtctctactaaagataaaaaaattagctgggtgtgttggtgggtgcctgtaatccagctactcgggaggctgaggcaggagaatcacttgaacccaggaggcagaggttgcagtgagctgagattgcgccactgtactccagcctgggcaacaaagcaagactctgtctcaaaaaaataaaaataaaaaaaatcttaaaaaaaaaaaaaaa

SEQ ID NO: 28018 - DNA, 3287 bp, Homo Sapiens
cctcctcctctttctcctgagaaacttcgccccagcggtgcggagcgccgctgcgcagccggggagggacgcaggcaggcggcgggcagcgggaggcggcagcccggtgcggtccccgcggctctcggcggagccccgcgcccgccgcgccatggcccgaagaccccggcacagcatatatagcagtgacgaggatgatgaggactttgagatgtgtgaccatgactatgatgggctgcttcccaagtctggaaagcgtcacttggggaaaacaaggtggacccgggaagaggatgaaaaactgaagaagctggtggaacagaatggaacagatgactggaaagttattgccaattatctcccgaatcgaacagatgtgcagtgccagcaccgatggcagaaagtactaaaccctgagctcatcaagggtccttggaccaaagaagaagatcagagagtgatagagcttgtacagaaatacggtccgaaacgttggtctgttattgccaagcacttaaaggggagaattggaaaacaatgtagggagaggtggcataaccacttgaatccagaagttaagaaaacctcctggacagaagaggaagacagaattatttaccaggcacacaagagactggggaacagatgggcagaaatcgcaaagctactgcctggacgaactgataatgctatcaagaaccactggaattctacaatgcgtcggaaggtcgaacaggaaggttatctgcaggagtcttcaaaagccagccagccagcagtggccacaagcttccagaagaacagtcatttgatgggttttgctcaggctccgcctacagctcaactccctgccactggccagcccactgttaacaacgactattcctattaccacatttctgaagcacaaaatgtctccagtcatgttccataccctgtagcgttacatgtaaatatagtcaatgtccctcagccagctgccgcagccattcagagacactataatgatgaagaccctgagaaggaaaagcgaataaaggaattagaattgctcctaatgtcaaccgagaatgagctaaaaggacagcaggtgctaccaacacagaaccacacatgcagctaccccgggtggcacagcaccaccattgccgaccacaccagacctcatggagacagtgcacctgtttcctgtttgggagaacaccactccactccatctctgccagcggatcctggctccctacctgaagaaagcgcctcgccagcaaggtgcatgatcgtccaccagggcaccattctggataatgttaagaacctcttagaatttgcagaaacactccaatttatagattctttcttaaacacttccagtaaccatgaaaactcagacttggaaatgccttctttaacttccacccccctcattggtcacaaattgactgttacaacaccatttcatagagaccagactgtgaaaactcaaaaggaaaatactgtttttagaaccccagctatcaaaaggtcaatcttagaaagctctccaagaactcctacaccattcaaacatgcacttgcagctcaagaaattaaatacggtcccctgaagatgctacctcagacaccctctcatctagtagaagatctgcaggatgtgatcaaacaggaatctgatgaatctggaattgttgctgagtttcaagaaaatggaccacccttactgaagaaaatcaaacaagaggtggaatctccaactgataaatcaggaaacttcttctgctcacaccactgggaaggggacagtctgaatacccaactgttcacgcagacctcgcctgtggcagatgcaccgaatattcttacaagctccgttttaatggcaccagcatcagaagatgaagacaatgttctcaaagcatttacagtacctaaaaacaggtccctggcgagccccttgcagccttgtagcagtacctgggaacctgcatcctgtggaaagatggaggagcagatgacatcttccagtcaagctcgtaaatacgtgaatgcattctcagcccggacgctggtcatgtgagacatttccagaaaagcattatggttttcagaacacttcaagttgacttgggatatatcattcctcaacatgaaacttttcatgaatgggagaagaacctatttttgttgtggtacaacagttgagagcagcaccaagtgcatttagttgaatgaagtcttcttggatttcacccaactaaaaggatttttaaaaataaataacagtcttacctaaattattaggtaatgaattgtagccagttgttaatatcttaatgcagatttttttaaaaaaaacataaaatgatttatctgtattttaaaggatccaacagatcagtattttttcctgtgatgggttttttgaaatttgacacattaaaaggtactccagtatttcacttttctcgatcactaaacatatgcatatatttttaaaaatcagtaaaagcattactctaagtgtagacttaataccatgtgacatttaatccagattgtaaatgctcatttatggttaatgacattgaaggtacatttattgtaccaaaccattttatgagttttctgttagcttgctttaaaaattattactgtaagaaatagttttataaaaaattatatttttattcagtaatttaattttgtaaatgccaaatgaaaaacgttttttgctgctatggtcttagcctgtagacatgctgctagtatcagaggggcagtagagcttggacagaaagaaaagaaacttggtgttaggtaattgactatgcactagtatttcagactttttaattttatatatatatacattttttttccttctgcaatacatttgaaaacttgtttgggagactctgcattttttattgtggtttttttgttattgttggtttatacaagcatgcgttgcacttcttttttgggagatgtgtgttgttgatgttctatgttttgttttgagtgtagcctgactgttttataatttgggagttctgcatttgatccgcatcccctgtggtttctaagtgtatggtctcagaactgttgcatggatcctgtgtttgcaactggggagacagaaactgtggttgatagccagtcactgccttaagaacatttgatgcaagatggccagcactgaacttttgagatatgacggtgtacttactgccttgtagcaaaataaagatgtgcccttattttaaaaaaaaaaaaaaaaaaaaaaaaaa

SEQ ID NO: 28019 - DNA, 2880 bp, Homo Sapiens
gcgcctccaaggtttcacggcttcctcagcagagactcgggctcgtccgccatgtccgccgcagacgaggttgacgggctgggcgtggcccggccgcactatggctctgtcctggataatgaaagacttactgcagaggagatggatgaaaggagacgtcagaacgtggcttatgagtacctttgtcatttggaagaagcgaagaggtggatggaagcatgcctaggggaagatctgcctcccaccacagaactggaggaggggcttaggaatggggtctaccttgccaaactggggaacttcttctctcccaaagtagtgtccctgaaaaaaatctatgatcgagaacagaccagatacaaggcgactggcctccactttagacacactgataatgtgattcagtggttgaatgccatggatgagattggattgcctaagattttttacccagaaactacagatatctatgatcgaaagaacatgccaagatgtatctactgtatccatgcactcagtttgtacctgttcaagctaggcctggcccctcagattcaagacctatatggaaaggttgacttcacagaagaagaaatcaacaacatgaagactgagttggagaagtatggcatccagatgcctgcctttagcaagattgggggcatcttggctaatgaactgtcagtggatgaagccgcattacatgctgctgttattgctattaatgaagctattgaccgtagaattccagccgacacatttgcagctttgaaaaatccgaatgccatgcttgtaaatcttgaagagcccttggcatccacttaccaggatatactttaccaggctaagcaggacaaaatgacaaatgctaaaaacaggacagaaaactcagagagagaaagagatgtttatgaggagctgctcacgcaagctgaaattcaaggcaatataaacaaagtcaatacattttctgcattagcaaatatcgacctggctttagaacaaggagatgcactggccttgttcagggctctgcagtcaccagccctggggcttcgaggactgcagcaacagaatagcgactggtacttgaagcagctcctgagtgataaacagcagaagagacagagtggtcagactgaccccctgcagaaggaggagctgcagtctggagtggatgctgcaaacagtgctgcccagcaatatcagagaagattggcagcagtagcactgattaatgctgcaatccagaagggtgttgctgagaagactgttttggaactgatgaatcccgaagcccagctgccccaggtgtatccatttgccgccgatctctatcagaaggagctggctaccctgcagcgacaaagtcctgaacataatctcacccacccagagctctctgtcgcagtggagatgttgtcatcggtggccctgatcaacagggcattggaatcaggagatgtgaatacagtgtggaagcaattgagcagttcagttactggtcttaccaatattgaggaagaaaactgtcagaggtatctcgatgagttgatgaaactgaaggctcaggcacatgcagagaataatgaattcattacatggaatgatatccaagcttgcgtggaccatgtgaacctggtggtgcaagaggaacatgagaggattttagccattggtttaattaatgaagccctggatgaaggtgatgcccaaaagactctgcaggccctacagattcctgcagctaaacttgagggagtccttgcagaagtggcccagcattaccaagacacgctgattagagcgaagagagagaaagcccaggaaatccaggatgagtcagctgtgttatggttggatgaaattcaaggtggaatctggcagtccaacaaagacacccaagaagcacagaagtttgccttaggaatctttgccattaatgaggcagtagaaagtggtgatgttggcaaaacactgagtgcccttcgctcccctgatgttggcttgtatggagtcatccctgagtgtggtgaaacttaccacagtgatcttgctgaagccaagaagaaaaaactggcagtaggagataataacagcaagtgggtgaagcactgggtaaaaggtggatattattattaccacaatctggagacccaggaaggaggatgggatgaacctccaaattttgtgcaaaattctatgcagctttctcgggaggagatccagagttctatctctggggtgactgccgcatataaccgagaacagctgtggctggccaatgaaggcctgatcaccaggctgcaggctcgctgccgtggatacttagttcgacaggaattccgatccaggatgaatttcctgaagaaacaaatccctgccatcacctgcattcagtcacagtggagaggatacaagcagaagaaggcatatcaagatcggttagcttacctgcgctcccacaaagatgaagttgtaaagattcagtccctggcaaggatgcaccaagctcgaaagcgctatcgagatcgcctgcagtacttccgggaccatataaatgacattatcaaaatccaggcttttattcgggcaaacaaagctcgggatgactacaagactctcatcaatgctgaggatcctcctatggttgtggtccgaaaatttgtccacctgctggaccaaagtgaccaggattttcaggaggagcttgaccttatgaagatgcgggaagaggttatcaccctcattcgttctaaccagcagctggagaatgacctcaatctcatggatatcaaaattggactgctagtgaaaaataagattacgttgcaggatgtggtttcccacagtaaaaaacttaccaaaaaaaaaaaaaaa

SEQ ID NO: 28020 - DNA, 4486 bp, Homo Sapiens
gccgcggcgtcctcgataacctatcgaaggcgccatggagcgaccggcgcccctggccgtgcttcccttctcggaccccgcgcacgccctgagcctgctgcgcggcctgagccagctgcgcgccgagcgcaagttcctggacgtgaccctggaggcggcgggcgggcgcgacttcccggcgcaccgtgcggtgctggccgccgccagcccctacttccgcgccatgttcgcggggcagctgcgcgagagccgcgccgagcgggtgcgcctgcacggagtgcctcccgacatgctgcagctgctgctggacttcagctacacgggccgcgtggcggtaagcggcgacaacgctgagccgctgctgcgcgccgccgacctgctgcagttcccggccgtgaaggaggcgtgcggggccttcctgcagcagcagctcgacctggccaactgcctggacatgcaggacttcgctgaggccttcagctgctcgggactggcgagcgcggcgcagcggttcattctgcgccacgtgggcgagctgggcgccgagcagctggagcggctgccactggcgcgcctgctgcgctacctgcgggacgacgggctgtgtgtgcccaaggaggaggccgcctaccagctggcgctgcgctgggtccgcgctgacccgccgcgccgcgccgcgcactggccgcagctgctggaggccgtgcgcctgcccttcgtgcgccgcttctacctgttggcgcacgtcgaggccgagccgctggtggcgcgctgcccaccctgcctgcgcctgctgcgcgaggcgcgcgacttccaggcggcgcgctacgaccgccacgaccgcgggccctgtccccgaatgcgtcctcgcccgtccaccggtctcgccgagatcctcgtgctcgtgggcggctgcgaccaggactgtgacgagctggtcactgtcgactgctacaacccgcagacgggtcagtggcgctacctggccgagttcccagaccacctgggcggaggctacagcatcgtggcgctgggcaatgacatctacgtgacgggtgggtccgatggctcccggctctatgactgcgtgtggaggtacaactcaagcgtgaatgagtgggcggaggtggcgcccatgctgaaggcccgcgagtaccacagctcctctgtgctggacggactgctgtacgtggtggccgccgacagcaccgagcgctatgaccacaccactgactcctgggaggccctgcagcccatgacctaccccatggacaactgctccaccactgcgtgccgtggccggctctatgccatcggctccctggctggcaaggagaccatggtgatgcagtgctacgacccggacaccgacctgtggtcgctggtggactgcggccagctcccgccctggtccttcgcccccaagactgcgactctaaacggactcatgtactttgtcagggatgactccgctgaggtggacgtgtacaacccgacgaggaacgaatgggacaagatcccgtccatgaatcaggtacatgtggggggcagcctggccgtccttggggggaagctgtacgtctctgggggatacgacaatacatttgaactctcggacgtggtagaggcctatgacccagagactcgcgcgtggagcgtggtggggcggctcccagaacccaccttctggcatggcagtgtcagcatcttccgccagttcatgccccagaccttctcgggtgggcgtggcttcgagttggacagtggcagcgatgacatggacccaggccgaccccggccgccgcgggaccccgatgagctgcactagccccagtctggcccggcacgggcctcggtgcaggtaactggcacctctgcggggcagtgccccactcctttgtgcacaaggacacgttgggctcacaggaggagcacaggctcttgggtggcgaagccagcccaggatccattacctggaaggtttctgtaccttgagagcctgaatcagaggccgtcgggaacgccctccctgcagttgaggaagagccactttcctgccagcacatgtttctgggtcttggaggtcacccccaccccgcggatcacagctcacccacgcggcgcacacccctcctgccgttgtcatctgcacctacttgttcccaccttgggagaggacgatgacttgggagggacgcgtgaagggagaaggggtcctcccatgaggctgaggatggcctgaacctggagcagcggaccaggcagacgggctgaagtggggtcccaaattccatgtccagaggtgtggggagcctgcctccctagctcctggcccctgccaggggcttacatcaaaacacctcagagggctgccctccagaggctgcacccagaacagtgggacatgagcaggggtgtgggcttggagggtgaagaggatgtggtcctatcagatgctgggcctcctcagccatagccccctgctcctaccccctgactggctcttgcgtcctcacctctcaccctctccttcccgggaggccctgggaggtgatcattgacacccagccaagcagacagctgcgggtgcccaagcccttgctgggcctgcgcgtgaggagtcccactgcttctaaaggaagtcctgggcaggaggtggctttggtggttggttccaaagttgaaaatgcttgcagtttgaccttagaagaagtgggaagaagaaggagctctacagggtcagctttgtttgatttgtccagtctaagaagtcccattgccaaagctttctgcaggagggtgaatgccgcagcttggcagcccctgggtttctcttggaaatggtcagtttcccctcaaagtacccaaagtagccttggcttgagtttttgtccttgcctcctttttagagaagagggcatttagactgcattttcctggttaaagaaggttaaagcaaatgtttattgccttttctagtgaactaactcgtagagatgttctcagcaggaagacagtcttagcactgtcacttagcagattgcacttaagtcccttgtgctggccagatggcgtggctggttgccttaatatgtcccaggacccctgacagggctgcctggcctctccctcgtgctcctcaagagcccagtccatacactgtggatgtcattgctgtcgggttaggaagtcttgtcctagaacgccctggctggtatgaccacagttcatggcggctcttctcgcttgggtcatggtcatcttccagcacctgctgtgctgggaaggccgaggatgggggcccagcactgtccaggcctgctggggcctggctgggagtcctgtgggcagcatggaacatgcagctgggcttcctgtgaccaggcaccctctggcactgttgcttgccctgtgccctggaccttttcctgcccttctccttcctctgctcccttggggctaccccttggcccctcctggtctgtgcaaactccctcagggagcccccctgccctgtagctctcgcttaacttcctaggggctgctgagcccacccagaggttgttggagttcagcggggcagcttgtctcccttgtcagcaggggcgtaagggctgggtttggccatacaaggttggctacgccctcaatccctgaccgttccaggcactgagctgggcacccacggaaggacatgctgtccagactgtgatgactgccagcacagggcatctcgggcttggctggtctgcgaggccttgcccctgtggaactctgggttcctgttttctcagtcttttttgcggctttgctgtggttggcagctgccgtactccaggcttgtgtcggccactcagatgagggctgtggtgcgagccagtgcaggagagctgcgcttgggattgtgccctctcctgtgtctgtcctccggacctacccaggtctccaccatcaggaccctgtctttgggtttagaagaccaagtatggggaaaaccaggcaccagcctctgcagcaatgggtccctctagcctgtggacaccagctgggggatccagggtcaggccccctcctctccccagtttccctctgctgtgggttctgggctgtcatgtctccaccacttaaggatgtctttacactgacttcaggatagatgctgggatgcctgggcatggccacatgttacatgtacagaactttgtctacagcacaaattaagttatataaacacagtgactggtatttaatgctgatctactataaggtattctatatttatatgacttcagagacgcgtatgtaataaaggacgccctccctccagtgtccacatccagttcaccccagagggtcgggcaggttgacatatttatttttgtctattctgtaggcttccatgtccagaatcctgcttaaggttttagggtaccttcagtactttttgcaataaaagtatttcctatccaaaaaaaaaaaaaaaaaa

SEQ ID NO: 28021 - DNA, 3599 bp, Homo Sapiens
gcgctccggtgcggcggcgcccgaggcccgaggcggaagtgggacggccaagcagggaagcgagggctcgggatcgacggccgcggggcgccgacgaggagtgcaggactcaggaagggcgagtgcgcggcgacagagcccggggaaggaggcagggcaaggccgggcttgggggcaggtggtccgggcatccagccttgaagatgcacaagaggaaaggacccccgggacccccgggcagaggcgccgcggccgcccgccagctgggcctgctggttgacctctccccagatggcctgatgatccctgaggacggggctaacgatgaagaactggaggctgagttcttggctttggtcgggggccagcccccagccctggagaagctcaaaggcaaaggtcccttgccgatggaggccattgagaagatggccagcctgtgcatgagagacccggatgaggatgaggaggaggggacggatgaggacgacttggaggctgatgatgacctgctggcggagctaaatgaggtccttggagaggagcagaaggcttcagagaccccacctcctgtggcccagccgaagcctgaggcccctcatccggggctggagaccaccttgcaggagaggctggcgctctatcagacagcaattgaaagcgccagacaagctggagacagcgccaagatgcggcgctacgatcgggggcttaaaacactggaaaacctgctcgcctccatccgtaagggcaatgccattgacgaagcggacatcccgccgccagtggccataggaaaaggcccggcgtccacgcctacctacagccctgcacccacccagccggcccctagaatcgcgtcagccccagagcccagggtcaccctggagggaccttctgccaccgccccagcctcatctccaggcttggctaagccccagatgcccccaggtccctgcagccctggccctctggcccagttgcagagccgccagcgcgactacaagctggctgccctccacgccaagcagcagggagataccactgctgccgctagacacttccgcgtggctaagagctttgatgctgtcttggaggccctgagccggggtgagcccgtggacctctcctgcctgccccctccacccgaccagctgcccccagacccaccgtcaccaccgtcgcagcctccgacccccgctacggcgccctccacaacagaggtgcccccacccccgaggaccctgctggaggcgctggagcagcggatggagcggtaccaggtggccgcagcccaggccaagagcaagggggaccagcggaaagctcgaatgcacgagcgcatcgtcaagcaataccaagatgccatccgagcccacaaggctggccgagccgtggatgtcgctgaattgcccgtgcccccaggcttccccccaatccagggcctggaggccaccaagcccacccagcagagtctggtgggtgtcctggagactgccatgaagctggccaaccaggatgaaggcccagaggatgaagaggatgaggtgcctaagaagcagaacagccctgtggcccccacagcccagcccaaagccccaccctcaagaactccccagtcgggatcagccccaacagccaaagcgccccccaaagccacatccaccagagcccagcagcagctggccttcctagagggccgcaagaagcagctcctgcaggccgcactgcgagccaagcagaaaaacgacgtggagggtgccaagatgcacctgcgccaagccaagggactggagcctatgctggaggcctcgcgcaatgggctgcctgtggacatcaccaaggtgccgcctgcccctgtcaacaaggacgactttgccctggtccagcggcctggcccgggtctgtctcaggaggccgcccggcgctatggtgaactcaccaagctcatacggcagcagcacgagatgtgcctgaaccactcaaaccaattcacccagctgggcaacatcactgaaaccaccaagtttgaaaagttggcggaggactgtaagcggagcatggacattctgaagcaagccttcgtccggggtctccccacgcccaccgcccgctttgagcaaaggaccttcagcgtcatcaagatcttccctgacctcagcagcaacgacatgctcctcttcatcgtgaagggcatcaacttgcccacacccccaggactgtcccctggcgatctggatgtctttgttcggtttgacttcccctatcccaacgtggaagaagctcagaaagacaagaccagtgtgatcaagaacacagactcccctgagttcaaggagcagttcaaactctgcatcaaccgcagccaccgtggcttccgaagggccatccagaccaagggcatcaagttcgaagtggttcacaagggggggctgttcaagactgaccgggtgctggggacagcccagctgaagctggatgcactggagatagcatgtgaggtccgggagatccttgaggtcctggatggtcgccggcccacaggggggcgactggaggtaatggtccggattcgggagccactgacagcccagcagttggagacgacgacagagaggtggctggtcattgaccctgtgccggcagctgtgcccacacaggttgctgggcccaaagggaaggcccctcctgtgcctgcccctgcaagggagtcagggaacagatcagcccggcccctgcatagcctcagtgtgctggcgtttgaccaagagcgtctggagcggaagatcctggccctcaggcaggcgcggcggccggtgcccccagaagtggcccagcagtaccaggacatcatgcaacgcagccagtggcagagggcacagctggagcaggggggtgtgggcatccgacgggaatacgcagcccagctggagcggcagctgcagttctacacggaggctgcccggcgcctgggcaacgatggcagcagggatgctgcaaaggaggcgctctataggcggaatctggtagagagtgagctgcagcggctccgcaggtgaggagcccatggggcgggcagcccccagaaagcgggcagcaggccccgataccgggaagagccgacacagccacgaaccagacaagcagacaatcagcggacaatcggttctggactcacccctcatccgggcccccagccccgccagagcctccgtggctgcgggtgttgggaaccatgcctgccagccagtatgtgcccctcacccaggcctggctgggccctggagagtcctgtttgcacagcccaggggtgtccggcctctggcccgccccggagcagggagggtggctggggccaagccccgagggcccctgcaagcactttacttcctgttcctccccagccttaaccccaaagccctcctgcaccccaaagaagccactgaggctggccgagccacactgtctccccaggggcgtcgacctggcccagctgggtccccagggccagcacatggaataaaatagccagggccacactcaaaaaaaaaaaaaaaaaaaaaaaaaaaaaaaaaaaaaaaaaaaaaaaaaaaaaaaaa

SEQ ID NO: 28022 - DNA, 3534 bp, Homo Sapiens
gtgggcaggcgcggcggagcgagcggggccggcggcgggcgccgagggacgccgagggacgccgaggcctcgggcgggggctggcccggggttccaggtctccagtgggggctgcagactaagcaaaatgaggcggttcctgaggccagggcatgaccctgtgcgggagaggctcaagcgggacctgttccagtttaacaagacggtggagcatggcttcccgcaccagcccagcgccctcggctacagcccgtccctgcgcatcctggccatcggcacccgttctggagccatcaagctctacggagccccaggcgtggagttcatggggctgcaccaggagaacaacgctgtgacgcagatccacctcctgcccggccagtgccagctggtcaccctgctggatgacaacagcctgcacctttggagcctgaaggtcaagggcggggcatcggagctgcaggaggatgagagcttcacactgcgtggacccccaggggctgcccccagtgccacacagatcaccgtggtcctgccacattcctcctgcgagctgctctacctgggcaccgagagtggcaacgtgtttgtggtgcagctgccagcttttcgtgcgctggaggaccggaccatcagctcggacgcggtgctgcagcggttgccagaggaggcccgccaccggcgtgtgttcgagatggtggaggcactgcaggagcaccctcgagaccccaaccagatcctgatcggctacagccgaggcctcgttgtcatctgggacctacagggcagccgcgtgctctaccacttcctcagcagccagcaactggagaacatctggtggcagcgggacggccgcctgctcgtcagctgtcactctgacggcagctactgccagtggcccgtgtccagcgaagcccagcaaccagagcccctccgcagcctcgtgccttacggtccctttccttgcaaagcgattaccagaatcctctggctgaccactaggcaggggttgcccttcaccatcttccagggtggcatgccacgggccagctacggggaccgccactgcatctcagtgatccacgatggccagcagacggccttcgacttcacctcccgtgtcatcggcttcactgtcctcacagaggcagaccctgcagccacctttgacgacccctatgccctggtggtgctggctgaggaggagctggtggtgattgacctgcagacagcaggctggccaccggtccagctgccctacctggcttctctgcactgttccgccatcacctgctctcaccacgtctccaacatcccgctgaagctgtgggagcggatcattgccgccggcagccggcagaacgcacacttctccaccatggagtggccaattgatggtggcaccagcctgaccccagccccaccccagagggacctgctgctcacagggcacgaggacggcacggtgcggttctgggatgcctcgggtgtctgcctgcggctgctctacaaactcagcactgtgcgcgtgttcctcaccgacacggaccccaacgagaacctcagtgcccagggcgaggacgagtggcccccactccgcaaggtgggctcctttgacccctacagtgatgacccccggctgggcatccagaagatcttcctctgcaagtacagcggctacctggctgtggcaggcacggcagggcaggtgctggtactggaactgaatgacgaggcagcggagcaggctgtggagcaggtggaggccgacctgctgcaggaccaagagggctaccgctggaaggggcacgagcgcctggcagcccgctcagggcccgtgcgctttgagcctggctttcagcccttcgtgttggtgcagtgtcagcccccggctgtggtcacctccttggccctgcactctgagtggcggctcgtggccttcggcaccagccatggctttggcctctttgaccaccagcagcggcggcaggtctttgttaagtgcacactgcaccccagtgaccagctggccttggagggcccactctcccgcgtcaagtccctcaagaagtccttgcgtcagtcattccgccggatgcgtcggagccgggtgtccagccggaagcggcacccagctggccccccaggagaggcacaggaggggagtgccaaggctgagcggccaggcctccagaacatggagctggcgcctgtgcagcgcaagatcgaggctcgctcggcagaggactccttcacaggcttcgtccggaccctgtactttgctgacacctacctgaaggacagctcccggcactgcccctcgctgtgggctggcaccaatgggggcaccatctatgccttctccctgcgtgtgcctcccgccgagcggagaatggatgagtctgtgcgggcagagcaggccaaggagatccagctgatgcaccgggcgccggtggtgggcatcctggtgctcgacggacacagcgtaccccttcctgagcccctcgaagtggcccatgatctgtcgaagagccctgacatgcagggaagccaccagctgctcgtcgtatcagaggagcagttcaaggtgttcacgctgcccaaggtgagtgccaagctgaagttgaagctgacggccctggagggctcaagagtgcggcgggtcagcgtggcccacttcggcagtcgtcgagccgaggactacggggagcaccacctggcagtccttaccaacctgggcgacatccaggtggtctcgctgcccctgctcaagccccaggtgcgctacagctgcatccgccgggaggacgtcagtggcatcgcctcctgcgtcttcaccaaatatggccaaggcttctacctgatctcaccctcggagtttgagcgcttctctctctccaccaagtggctggtggagccccggtgtctggtggattcagcagaaaccaagaaccaccgccctggtaacggtgcgggccccaagaaggccccgagccgagccaggaactcagggactcagagtgatggcgaggagaagcagcccggcctggtgatggagcgcgctctgctcagtgatgagagagtcctgaaggaaatccagagcacactggagggagaccgcgggagcggcaactggcgttcacatcgagcggccgtggggtgcagcctcagcaatggcggagcagagtgagtggctgagcgtccaggctgcgcgatgagcacacactactactgatggcctttcgggggtccctgccccagccggagaggccggtgcacagggccccgccaggggctgggggcatcccggcttccacaatgcagctgctctgggcctcgggagaggagagaccccagtcccctgggctgcccttcccgggcctcgtctgtctgggtcctttggtcaatgttgcacagtttttattgctcccatccctttttgtagtgggctgggttttaagttataaatgttaactgcctctgggtgaaaaagtttttaataaacacctattacctcttaaaaaaaaaaaaaaa

SEQ ID NO: 28023 - DNA, 3489 bp, Homo Sapiens
cgacttcctgccccgccagagccaggaagcgggagccgggacccagggcccgggatcgccgagcccgacctcgggcgccccgccggtcacctccgcgcggacaccagccctgcagagcccagggagatggaagacttcgcccgaggggcggcctccccaggcccctcccggcctggcctggttcccgtcagcatcatcggggctgaggatgaggattttgagaacgagctggagacaaactcagaagagcaaaacagccagttccagagcctggagcaggtgaagcggcgcccagcccacctcatggccctcctgcagcacgtggccctgcagtttgagccaggacccctgctttgctgtctgcatgccgacatgctgggctcactgggccccaaggaggccaagaaggccttcctggacttctaccacagcttcctggagaagacagcggtgagagaccttcaagctgccccaaccctgcaatccctgtttgggcctgcagagtcaccatgcggtccccagcctctgccctgagggcagctgctgacccaggccttccccagcaccctcgcttagaccagggttcctggcagtcctcccggcctgcatctcagcacaccaagtcctcctcttcaccccattctctctcttgagcaggttctccgggtgccggtccctcccaacgtcgcctttgaacttgaccgcactagggctgacctcatctccgaggatgtccagcggcggttcgtgcaggaggtggtgcaaagccagcaggtagccgtgggccggcagctggaggacttccgttccaagcggctcatgggcatgacgccctgggagcaggagctggcccagctggaggcttgggttgggcgggaccgagccagctacgaggcccgggagcggcacgtggcggagcggctgctcatgcacctggaggagatgcaacataccatctctaccgacgaagaaaagagtgctgccgtggtcaacgccattggcctgtacatgcgccaccttggggtgcggaccaagagtggagacaagaagtcggggaggaacttcttccggaaaaaggtgatggggaaccggcggtcggacgagcctgccaagaccaagaaggggctgagcagcatcctggatgccgcccgctggaaccggggagagccccaggttccagattttcgacacctcaaagcagaggttgatgccgagaagccaggtgctacagaccggaagggaggcgtggggatgccctctcgggaccggaatatcggggctcctgggcaggacacccctggagtctctctgcaccctctgtccctggacagcccagaccgggaaccaggtgctgacgcccccctggagctgggggactcatccccgcagggcccaatgagcctggagtccttggcgcccccagagagtaccgacgagggggccgaaaccgagagccccgagcctggagatgagggggagccggggcggtcgggactggagcttgaaccagaagagcctcccggctggcgggaactcgtccccccagacaccctgcacagcctgcccaagagccaggtgaagcggcaggaggtcatcagcgagctgctggtgacagaggcggcccacgtgcgcatgctgcgggtgctgcacgacctcttcttccagcccatggcagaatgcctgttcttccccttggaggagctgcagaacatcttccccagcctggacgagctcatcgaggtgcattccctgttcctcgatcgcctgatgaagcggaggcaggagagtggctacctcatcgaggagatcggagacgtgctgctggcccggtttgatggtgctgagggctcctggttccagaaaatctcctcccgcttctgcagccgccagtcatttgccttagagcagctcaaagccaagcaacgcaaggaccctcggttctgtgccttcgtgcaggaagctgagagccgcccgcggtgccgccgcctgcagctgaaggacatgatccccacggagatgcagcggctgaccaagtaccccctgctcctgcagagcatcgggcagaacacagaagagcccacagaacgggagaaagtggagctggcagccgagtgctgccgggaaattctacaccacgtcaaccaagccgtgcgtgacatggaggacctgctgaggctcaaggactatcagcggcgcctggacttgtcccaccttcggcagagcagcgaccctatgctgagcgagttcaagaacctggacatcaccaagaagaaattggtccacgagggcccactgacgtggcgggtgactaaggacaaggcagtggaggtgcatgtgctgctgctggacgacctgctgctgctgctccagcgccaggacgagcggctgctgctcaagtcccatagccggacactgacgcccacgcccgatggcaagaccatgctgcggcccgtgctgcggctcacctccgccatgacccgcgaggtggccaccgatcacaaagccttctacgtcctttttacctgggaccaggaggcccagatatacgagctggtggcacagactgtgtcggagcggaaaaactggtgtgctctcatcactgagactgccggatccctgaaagtccctgcccctgcctctcgccctaagccccggcccagcccgagcagcacccgagaacccctcctcagcagctctgagaacggcaatggtggccgagagacgtctccagctgatgcccggaccgagagaatcctcagtgacctcctgcccttctgcagaccaggccccgagggccagctcgctgccacggcccttcggaaagtgctgtccctgaagcagcttctgtttccggcggaggaagacaatggggcggggcctcctcgagatggggatggggtcccagggggcggccccctgagcccagcacggacccaggaaatccaggagaacctgctcagcttggaggagaccatgaagcagctggaggagttggaggaggaattttgccgcctgagacccctcctgtctcagcttggggggaactctgtcccccagcctggctgcacttgaggttcccgcccaggaaggccttttgcaagaaggagaggaatgggggagaggacgtgagggaccacccccacccacacagctgccgcagcatctcacaccccgagggcctgaggagagggagctgtgggccacgcctgggaggggcccagctggggttactggccccgcatgagcctcggccatctctccctcctgccctctgcttgggggactcagggctccattctggagggcaccacggtgacccgggccatctcagtattgcctgtgggggccacccctccacccccacccccaagtgccttcgctctgtttttataccctgaattggaggtttattttttaatatatattatctaagaagaaaaaaaaaaaaaaaaaaaaaaaaaaaaaaaaaaaaaaaaaaaaaaaaaaaaa

SEQ ID NO: 28024 - DNA, 4239 bp, Homo Sapiens
ctacgagcggctgtgaaggaaactgtttaaccggatcccattgtacccagagtgcagagccgcctttccagcatgcaggggctgctcagcgtttagtcacatcaagaaatagaacagaattcagccatggccccaagaaagagaggtggacgaggtatttcattcatcttttgctgtttccgaaataatgatcacccagaaatcacgtatcggctgcgaaatgatagcaactttgcgcttcagaccatggaaccagcattgcccatgccccctgtggaggagctggatgtcatgttcagtgaactggtggatgaactggacctcacagacaaacacagagaagccatgtttgcacttccagctgagaaaaaatggcaaatatactgtagcaagaaaaaggaccaggaagaaaacaagggagctacaagttggcctgaattctacattgatcagctcaattccatggctgctagaaaatctctgctggctttagagaaggaagaagaagaagaaagaagtaaaactatagagagtttaaagacagcactgaggacaaaaccaatgaggtttgtaaccagattcatcgacttggatggcctatcatgtatcctcaactttctaaagaccatggactacgagacctcagagtctcgaatacatacttctctcattggctgtataaaggcgttaatgaacaactctcaaggccgggctcacgtcctggctcattctgagagtattaatgtaattgctcagagtctgagcacagagaacattaaaacgaaggtggccgtgctggaaatcttgggcgccgtgtgcctggttcccgggggccacaagaaggttctgcaggccatgctgcactaccagaagtatgccagcgaaaggacccgctttcagacattaattaacgacttggataaaagcactgggcggtatcgagatgaagtgagtctcaagactgccatcatgtccttcattaatgcagtgctcagccaaggtgcaggagtggagagtttggactttagacttcatcttcgctatgaatttctgatgttaggaattcaacctgtaatagataaattaagggaacacgaaaattcaacattagataggcatttagacttttttgaaatgctccgaaatgaagatgaactagaatttgccaaaagatttgaactggttcacatagacacaaaaagtgcaactcagatgtttgagctgaccaggaagaggctgacacatagtgaagcttacccgcatttcatgtccatcctgcaccactgcctccaaatgccttacaagaggagtggcaacactgttcagtactggctactactagatagaattatacagcagatagttatccagaatgacaaaggacaggaccctgactccacacctttggaaaactttaatattaagaatgtcgtacgaatgttggttaatgaaaatgaagttaagcagtggaaagaacaagcggaaaaaatgagaaaagagcacaatgagctacaacagaaactggaaaagaaagaacgagaatgtgatgctaagactcaagagaaggaagagatgatgcagaccttaaataaaatgaaagagaaacttgaaaaggagactactgagcataagcaagtcaagcagcaggtggcggacctcacagcacagctccatgagctcagcaggagggccgtctgtgcttcaatcccaggtggaccctcgcctggagcaccaggagggccctttccttcctctgtgcctggatctctccttcctcccccaccacccccacctctaccaggtgggatgcttccccctccaccgcctcccctccctccaggtggccctcctcctcccccagggcctcctcccttaggggcaatcatgccacctcctggtgctccaatgggcctagcactgaagaagaaaagcattcctcagcccacaaatgccctgaaatccttcaactggtctaaactgcccgagaacaaactggaaggaacagtatggaccgaaattgatgatacaaaagtcttcaaaattctagatcttgaagacctggaaagaaccttctctgcctatcaaagacagcagaaagaagcagatgccattgatgacactctgagttccaaacttaaagttaaagagctttcggtgattgatggtcggagagctcagaattgcaacatccttctatcgaggttgaaattatccaatgacgaaatcaaacgggcaattctaacaatggacgaacaggaagatctgcccaaggacatgttggaacagctcttgaaatttgttcctgaaaaaagtgacattgacctattggaggaacataaacacgaactggatcggatggccaaggctgataggttcctttttgagatgagccgaattaatcactatcagcaaaggttgcaatcgctgtacttcaaaaagaagtttgcagagcgtgtggcagaagtgaaacctaaagtggaagcaattcgttctggctcagaagaggtgtttaggagtggtgccctcaagcagttgctggaggtggttttggcatttggaaattatatgaataaaggtcaaagagggaatgcatatggattcaagatatctagcctaaacaaaattgctgacacaaaatccagcatcgacaaaaacattacccttttgcactatctcatcactattgtggaaaataagtaccccagtgttctcaatctaaatgaagaattgcgagatattcctcaagctgcgaaagtaaacatgactgagctggacaaagaaataagtaccttgagaagtggcttgaaagcagtagagacagagctggaatatcagaagtctcagcccccacagcccggagataagtttgtgtctgttgtcagccagttcatcacagtagccagcttcagcttctctgatgttgaagaccttctagcagaagctaaagacctgtttactaaagcagtgaagcactttggggaagaggctggcaaaatacaaccagatgagttctttggcatttttgatcaatttcttcaagctgtgtcagaagccaaacaagaaaacgaaaatatgagaaagaaaaaggaggaagaagaacgtcgagctcgcatggaagctcagctcaaagaacaacgtgaaagggaacgtaaaatgagaaaagctaaagagaatagtgaagaaagcggagagtttgatgaccttgtttcagctttacgctcaggagaagtgtttgacaaagacctttctaaattgaaacggaatcgcaaacgtattaccaaccagatgactgacagcagcagagagagaccaatcacaaaacttaatttctaattttccatgaatacttttttttagaaagctcattagcagccctctaaagtgactagaacgtttcattacactgccttgcaatccaaacagtggcaattttttccttcatctgtgagtgaatgtgtgaacgtgtgtatgtaaatgtatgtgtgtatatattaaaaaatgtatatagatgtctgagtgttgtctggagacctatacgtatggttaaaaagatttatgttaatgtatgtgctccaaaacctttcgtgtatgcattcacattgagtgtggctcattttctttccccgaacgccatgactgttcagaagcacaatactatctcctgaaagagataagagacattccctagattcaaaggcaaaacagaagaaacaaacaaacaaacaaaaaaagcttgcaaaatattttatggtttccaagcttgatatcctttaaaattattttcattgatggaactggagttgttggaaaaacatagatttaaaatgatttttgatagctgacattgtgatgttgatgtatcacatcagtaataggaccagctttgaatttctgacattggtgtggggatacagtctgtaaatgtttattgagaacatcttgcacacaatttgaattatgtagaatgtcaatcaagtttttgtatatttaaaagttggacatcaattttttcccctgatttcatcaagttatctctgccaagtgctcttgataatttcttcagatttttggaaaaaaacactatataaatgcaatccatgctttttttaaagaacaacattgccagagtatgcttgttctaacaatatagatatataaaccttaaaaataataaaatatctcacccaagacttaaaggaagaattctctgaagggataaagattactaaaaaaaaaaaa

SEQ ID NO: 28025 - DNA, 2619 bp, Homo Sapiens
acgggcccgagtcgcgaggcttgggattgacgtgagtgaattcagatataactcaagcttgttagagggctttttaaaaataaaaagttgattccgtgcaagagagcaagttactgctgcttaccgttcagagacttacaggtgcttgcctgcattgcaataaaggactcatttattgagcaagacttatatttatctcttcattttggagagcctaataaactgttattacagtttctctactgactttcaaaagttttgaagtttgaaagacctttgcaattaaaacagcatgagcacggccagaacagagaaccctgttataatgggtctgtccagtcaaaatggtcagctgagaggccctgtgaaacccactggtggccctggaggagggggcacacagacacagcaacagatgaaccagctgaaaaacaccaacacaatcaataatggcactcagcagcaagcacagagtatgaccaccactattaaacctggtgatgactggaaaaagactttaaaactccctccaaaggatctaagaatcaaaacttcggatgtgacctccacaaaaggaaatgagtttgaagattactgtttgaaacgggagttactgatgggaatttttgaaatgggctgggaaaagccatctcctattcaggaggagagcattcccattgctttatctggtagggatatcttagctagagcaaaaaatggaacaggcaagagcggtgcctacctcattcccttacttgaacggctagacctgaagaaggacaatatacaagcaatggtgattgttcccactagagaacttgctctacaggtcagtcaaatttgcatccaggtcagcaaacacatgggaggggccaaagtgatggcaaccacaggaggaaccaatttacgagatgacataatgaggcttgatgatacagtgcacgtggtgattgctacccctgggagaatcctggatcttattaagaaaggagtagcaaaggttgatcatgtccagatgatagtattggatgaggcagataagttgctgtcacaggattttgtgcagataatggaggatattattctcacgctacctaaaaacaggcagattttactatattccgctactttccctcttagtgtacagaagttcatgaattcccatttgcagaaaccctatgagattaacctgatggaggaactaactctgaagggagtaacccagtactacgcatatgtaactgagcgccaaaaagtacactgcctcaacacacttttctccaggcttcagataaaccagtcgatcattttctgtaactcctctcagcgagttgaattgctagccaagaagatttctcaactgggttattcttgcttctatattcatgctaaaatgaggcaggaacatcgaaatcgtgtatttcatgatttccgaaatggcttatgccgcaatcttgtttgcactgatctgtttacccgaggtattgatatacaagctgtgaatgtggtaataaactttgatttcccaaagctggcagagacctatctccatcgtattggaagatcaggtcgctttggtcatcttggcttagccatcaacttgatcacatatgatgatcgcttcaacctgaaaagtattgaggagcagctgggaacagaaattaaacctattccgagcaacattgataagagcctgtatgtggcagaataccacagcgagcctgtagaagatgagaaaccttaacaagcatgctttgacaaattacaaaaggctcgtttggatctgtgacacatcgttttggggggaatgctcttctctttgtgggtttttcatcttttattttggaactatgaagacttaaaagagctcagacattttctttttttaactggtgaagagaaaaaggctgaaaagaaggaatataccttttttgttccacttgtttgcactgtgtgctgactgaacattagttgcactaactgctggtttttaaaaaatgttttctggggaaaggggacaaggaaggaaaagaaagaagagaaggggagaaaccctaaaaagagaagaatcttaatgaacacacaagcttgtcaatgatttcaaaattctccaacagctgactctcgtgcatttcaacttctccctgattcctcatccgttttttaagcctgaagagcttattacttatttgtgcgaagtgccttatgctatgagaccattcagaatatcatcttttagacacagcccgaggaatcaacaatagtaactctttctttccgttttttttctttttcttttaaaaaatgtctttttattttggtttcaggttgaagtctcttccctttctacccagtactcgagcccagggctagaagttgaaactcactagtaatgttaaacaccattttttttttctttttggggaggagttgatatgcaactgcagttcatccgcactgtaaatacatgtatttaaaaaaacaatcccaagtaaaaatttcttctgggctgagttcttctgtaaagagatgaacgcaatgccaataaaattgaacaagaacaatgataaaaaaaaaaaaaaaaaaaaaaaaaaaaaaaaaaaaaaaaaaaaaaaaaaa

SEQ ID NO: 28026 - DNA, 3576 bp, Homo Sapiens
gattcgggacaggggcaggcagtggggggacagcctgcaaccagaacgcgaaacccagcctcacggtccaccttctccaatccctgcctgctgggagaggacgatctcttgagaaaggaaagacttctgtgctcccgagaacttcctatcagtagaaccacagtccctcttcggacatgctgttctcagaacaaaagaaatggtggaattatgcaatgcttagaaatggcatcgtcgctttcactcacattcattttccaaggtcctggctgcagggaaacaagctgggctttttataattaaggttggaagaagtcaccacaggcagcagaactccatcttgagatgaaataacatctacctggacctctggcagaatttcaaggcacacactgggctgactctggcgccatgatgttgccttatccttcagcactgggagatcaatactgggaagagattttgcttccaaagaatggggaaaatgtagagactatgaagaaattgacccaaaatcataaagcgaaaggcttgccttctaatgatactgactgcccccagaaaaaggagggaaaggcccaaatagtggtaccagttacattcagggatgtgactgtgatcttcacagaagcagaatggaagagactgagtccagagcagaggaatctatacaaagaagtgatgctggagaattacaggaatcttctctcattggcagaaccaaagccagaaatctacacttgttcctcctgccttctggccttctcctgtcagcagttcctcagtcaacatgtacttcagatcttcctgggcttatgtgcagaaaatcacttccatccagggaattctagcccagggcattggaaacagcaggggcagcagtattcccatgtaagctgttggtttgaaaatgcagaaggtcaggagagaggaggtggctccaaaccctggtctgcaaggacagaggagagagaaacctcaagggcattccccagcccactccaaagacagtcagcaagtcctagaaaaggcaacatggtggtagaaacagagcccagctcagcccaaagaccaaaccctgtgcagctagacaaaggcttgaaggaattagaaaccttgagatttggagcaatcaactgtagagagtatgaaccggaccataacctggaatcaaactttattacaaacccgaggaccctcttagggaagaagccctacatttgcagtgattgtgggcgaagctttaaagatagatcaaccctcatcagacaccatcgtatacactcgatggagaagccttatgtgtgcagtgagtgcgggcgaggttttagccagaagtccaacctcagcagacaccagagaacacattcagaagagaagccttatttgtgcagggagtgtgggcaaagctttagaagtaagtccatcctcaatagacatcagtggactcactcagaggagaagccctatgtttgcagcgagtgtgggcgaggctttagcgagaagtcatccttcatcagacaccagaggacacactccggtgagaaaccctatgtgtgcctggagtgtggacgaagcttttgtgataagtcaaccctcagaaaacaccagaggatacactcaggggagaagccttatgtttgcagggagtgtgggcgaggctttagccagaactcagatctcatcaaacaccagaggacacacttggatgagaagccttatgtttgcagggagtgtgggcgaggcttttgtgacaagtcaaccctcatcatacacgagcggacgcactctggagagaagccttatgtgtgtggtgagtgtggccgaggctttagtcggaaatcactcctccttgtccaccagaggacacactcaggggagaagcattatgtctgcagggagtgtaggcgaggttttagccagaagtcaaatctcatcagacaccagaggacgcactcaaatgagaagccttatatttgcagggaatgtgggcgaggcttttgtgacaagtcaaccctcattgtacatgagaggacacactcaggagagaagccttacgtgtgcagtgagtgtggccgaggctttagccggaaatcactcctccttgtccaccagaggacacactcaggggagaagcattatgtttgtagggagtgtgggcgaggctttagtcataagtcaaatctcatcagacaccagaggacacactgacgggagaaacctgtgtatgcaggggtcatgaacaagacctgagtgaccagtcaagcctcatgttaccccagagagacacatggggagtagaccctgtgtacacagattgtgagtgaagttccagagatgtgtcagcccttatcaggcatgggagggacacgttcaggagaggagccttatgagtatagagtacgggcaactgtagccatcagtcggccttgagcatgcacaaaaggacacacttaggagagaagtttatgtgtagggactgtgggaaggctttagcaataatcaacatttaccagacatccaatgacagcctcaggggaaagcacccttgtctggggagtgttggggagcatcagtaaaagaatggacactcaggcacagagtggccctcaggaaggaggtctttgtttgtaggatgtatgggcaaagcttttgtgatcacacaccacagggagaatctgcatgtggggacactgtggagctctgcccagatgaccttttcaggggtaacaccccagctgcttgagagaacagtgttgctgctggcagagatgcattccagagatgcactccgctctggaactcactctcagccacagggagctgcatgcaccacaggggcaatgcacctttgcaggggtaccttctggccccaacccttgactcaacggggacaactccagaaggtcattccagatccagagatccccatcgaactgaaggatcactgggttgcagacacattgcaggtcagcttcttcctctgcccagtcctgccctcactccccagtgaatcctcaattttctgtctcgttgtctgtccagataattgattctaagacatgttaggtatataaggagtgtagataaggcttcagccatgagtcaccccccagtaagccccagagtatattgaatagaaattctgcatgtgtggggagaatggacaaggacttaggaaaaagtcctcatcaaagaacagcttttttgggacaagctttacatgggtggggagggaaaatgtgaaacacattagcaataagttaaacctcatcttgtactaaaggaggacacactcagggagaagacctctgtgggcagggcttgtgggtggagcttcatcccgatgtcactcctcaactgacttaggaggacagtcttgctaccccaagtcactacctcactcacctctgagggattttcaggaaatgtcttgactcccccatgtactctgtatgtgagcgaagatggcagtaactgttaaataagcattcttttctacttcttggaatcagatgaaataaaaaagcaggctttatttaagtaatcaaaaaaaaaaaaaaaaaaaaaaaaaaa

SEQ ID NO: 28027 - DNA, 2639 bp, Homo Sapiens
cgggcgccattgtgcttcgctgccgactgcatttcctcagtcacgggcctagaactccaaggagaaaggcggcgaaaaatctttaagaatggagtctaaaccttcaaggattccaagaagaatttctgttcaaccttccagctccttaagtgctaggatgatgtctggaagcagaggaagtagtttaaatgatacctatcactcaagagactcttcatttagattggattctgaatatcagtctacatcagcatcagcatctgcgtcaccatttcaatctgcatggtatagtgaatctgagataactcagggagcacgctcaagatcgcagaaccagcaacgggatcatgattcaaaaagacctaaactttcctgtacaaactgtactacctcagctgggagaaatgttggaaatggtttaaacacattatcagattcatcttggaggcatagtcaagttcctagatcttcatcaatggtacttggatcatttggaacagacttaatgagagagaggagagatttggagagaagaacagattcctctattagtaatcttatggattatagtcaccgaagtggtgatttcacaacttcatcatatgttcaagacagagttccttcatattcacaaggagcaagaccaaaagaaaactcaatgagcactttacagttgaatacatcatccacaaaccaccaattgccttctgaacatcagaccatactaagttctagggattccagaaattctttaagatcaaatttttcttcaagagaatcagaatcttcccgaagcaatacgcagcctggattttcttacagttcaagtagagatgaagccccaatcataagcaattcagaaagggttgtttcatctcaaagaccatttcaagaatcttctgacaatgaaggtaggcggacaacgaggagattgctgtcacgcatagcttctagcatgtcatctacttttttttcacgaagatctagtcaggattccttgaatacaagatcattgaattctgaaaattcttacgtttctccaagaatcttgacagcttcacagtcccgtagtaatgtaccatcagcttctgaagttcccgataatagggcatctgaagcttctcagggatttcgatttcttaggcgaagatggggtttgtcatctcttagccacaatcatagctctgagtcagattcagaaaattttaaccaagaatctgaaggtagaaatacaggaccatggttatcttcctcacttagaaatagatgcacacctttgttctctagaaggaggcgagagggaagagatgaatcttcaaggatacctacctctgatacatcatctagatctcatatttttagaagagaatcaaatgaagtggttcaccttgaagcacagaatgatcctcttggagctgctgccaacagaccacaagcatctgcagcatcaagcagtgccacaacaggtggctctacatcagattcggctcaaggtggaagaaatacaggaatatcagggattcttcctggttccttattccggtttgcagtccccccagcacttgggagtaatttgaccgacaatgtcatgatcacagtagatattattccttcaggttggaattcagctgatggtaaaagtgataaaactaaaagtgcgccttcaagagatccagaaagattgcagaaaataaaagagagcctccttttagaggactcagaagaagaagaaggtgacttatgtagaatttgtcaaatggcagctgcatcatcatctaatttgctgatagagccatgcaagtgcacaggaagtttgcagtatgtccaccaagactgtatgaaaaagtggttacaggccaaaattaactctggttcttcattagaagctgtaaccacctgtgaactatgtaaagagaagttggagcttaacctggaggattttgatattcatgaactacatagagctcatgcaaatgaacaagctgagtatgagtttatcagctctggtctctacctagtggtgttattgcacttgtgcgaacaaagcttttctgatatgatgggaaatacaaatgaaccaagcacacgtgtccgatttattaaccttgcaagaactcttcaggcacatatggaagatctcgaaacttcagaggatgattccgaagaagacggagaccataacaggacatttgatattgcctaacttcatataagacagatggatgatctgtgaacataagtgtttattaaaaatggcaattaaatataaattacttttgtgggggaatgcctaataaatacattgactatatataaaatgaatatatacatacacatgtatgcctgtatatatatattcattctccagtgttgctgaattaaaattctgctggactttttaacatagcaaatccgatgtttataaactggtaatcaaaaaggttttttcttttaggtgagtgggaaagtattacccttgttttaaatatctaagcaatgcctatcaacccttttttgtgttatgattactgtagtcatatttatgaaaaaaggtttgtgttttactcttgctagtgagaaaagtgggacaaaatatacttttgaaataaaatgctatatggcaaaaaaaaaaaaaaaaa

SEQ ID NO: 28028 - DNA, 1843 bp, Homo Sapiens
ggtccgcgtgtggaagtctgtgaggcgcagaggtggggcaggccgtctgactagctaggcggctgggagcgttttcgtggcggggaacggaggttgaattgccctgcctgggctcatagggaaggaggatgtgaaggagcttgtgaaggcagaggaaggctggagtgcagtggcacaaccttggctcgctccagtgtctacctcccaggttcaagtgattctcctgcctcagcctcccgagtagctgggattacagattattgaataataaaatacagttttgaaaaaaatggatgaagaacctgaaagaactaagcgatgggaaggaggctatgaaagaacatgggagattcttaaagaagatgaatctggatcacttaaagctacaatagaagacattctattcaaggcaaagagaaaaagagtatttgagcaccatggacaagttcgacttggaatgatgcgccacctttatgtggtagtagatggatcaagaacaatggaagaccaagatttaaagcctaatagactgacgtgtactttaaagttgttggaatactttgtagaggaatattttgatcaaaatcctattagtcagattggaataattgtaactaagagtaaaagagctgaaaaattgactgaactttcaggaaacccaagaaaacatataacgtctttgaaggaagctgtggatatgacctgccatggagagccatctctttataattccctaagcatggctatgcagactctaaaacacatgcctggacatacaagtcgagaagtactaatcatctttagcagccttacaacttgcgatccatctaatatttatgatttaatcaagaccctaaaggcagctaaaattagagtatctgttattggattgtctgcagaagttcgcgtttgcactgtacttgctcgtgaaactggtggcacgtaccatgttattttagatgaaagccattacaaagagttgctcacacatcatcttagtcctcctcctgctagctcaagttctgaatgctcacttattcgtatgggatttcctcagcacaccattgcttctttatctgaccaggatgcaaaaccctctttcagcatggcgcatttggatggcaatactgagccagggcttacattaggaggctatttctgcccacagtgtcgggcaaagtactgtgagctacctgttgaatgtaaaatctgtggtcttactttggtgtctgctccccacttggcacggtcttaccatcatttgtttcctttggatgcttttcaagaaattcccctagaagaatataatggagaaagattttgttatggatgtcagggggaattgaaagaccaacatgtttatgtttgtgctgtgtgccaaaatgttttctgtgtggactgtgatgtttttgttcatgattctctacactgttgccctggctgtattcataagattccagctccttcaggtgtttgattccagcatgtagtatacattgtatgtgttaaaaagaaatttgcaactgtgaataaaaggacttctttagaagaagcttcatttaaaacatgaaaggataatctgacttaagaaactttttgctaagaaaaggtaatattttattaaattttaaatttgtgttgtcacagaaatacctgaaattcagtagtacttcattcaattaattttgttttctattattttgagttatactgttttcaaagtcattatgcagtatgtataaacttataagaattaaattgatgtgataattttatgtttttataattaaatatagaatctttaaaaaaaaaaaaaaaaaaaaaaaaaaaaaaaaaaaaaaaa

SEQ ID NO: 28029 - DNA, 2530 bp, Homo Sapiens
gttttttttttgcctacctcattgttcttaatgcattgagaggtgatttagtttatatgtttttggaagaaaccattaatgtttaatttaatcttaataccaaaacgaccagattgaagtttgacttttattgtcacaaatcagcaggcacaagaactgtccatgaagatgggaaatagccttaaggctgatgcagtttacttacaagtttagaaaccagaatgctttgtttttaccagattcaccattagaggttgatggggcaactgcagcccatgacacaagatctcattgttctcgatgtagaggggttggtagcagacaggtggttacattagaatagtcacacaaactgttcagtgttgcaggaaccttttcttgggggtgggggagtttcccttttctaaaaatgcaatgcactaaaactattttaagaatgtagttaattctgcttattcataaagtgggcatcttctgtgttttaggtgtaatatcgaagtcctggcttttctcgttttctcacttgctctcttgttctctgtttttttaaaccaattttactttatgaatatattcatgacatttgtaataaatgtcttgagaaagaatttgtttcatggcttcatggtcatcactcaagctcccgtaaggatattaccgtctcaggaaaggatcaggactccatgtcacagtcctgccatcttactttcctcttgtcgagttctgagtggaaataactgcattatggctgctttaacctcagtcatcaaaagaaacttgctgttttttaggcttgatctttttcctttgtggttaattttcctgtatattgtgaaaatgggggattttccctctgctcccacccacctaaacacagcagccatttgtacctgtttgcttcccatcccacttggcacccactctgacctcttgtcagtttcctgttcctggttccatctttttgaaaaaggccctcctttgagctacaaacatctggtaagacaagtacatccactcatgaatgcagacacagcagctggtggttttgtgtatacctgtaaagacaagctgagaagcttactttttggggaagtaaaagaagatggaaatggatgtttcatttgtatgagtttggagcagtgctgaaggccaaagccgcctactggtttgtagttaacctagagaaggttgaaaaattaatcctacctttaaagggatttgaggtaggctggattccatcgccacaggactttagttagaattaaattcctgcttgtaatttatatccatgtttaggcttttcataagatgaaacatgccacagtgaacacactcgtgtacatatcaagagaagaaggaaaggcacaggtggagaacagtaaaaggtgggcagatgtctttgaagaaatgctcaatgtctgatgctaagtgggagaaggcagagaacaaaggatgtggcataatggtcttaacattatccaaagacttgaagctccatgtctgtaagtcaaatgttacacaaaaaaaaatgcaaatggtgtttcattggaattaccaagtgcttagaacttgctggctttcccataggtggtaaaggggtctgagctcacaccgagttgtgcttggcttgcttgtgcagctccaggcacccggtgggcactctggtggtgtttgtggtgaactgaattgaatccattgttgggcttaagttactgaaattggaacaccctttgtccttctcggcgggggcttcctggtctgtgctttacttggcttttttccttcccgtcttagcctcacccccttgtcaaccagattgagttgctatagcttgatgcagggacccagtgaagtttctccgttaaagattgggagtcgtcgaaatgtttagattcttttaggaaaggaattattttccccccttttacagggtagtaacttctccacagaagtgccaatatggcaaaattacacaagaaaacagtattgcaatgacaccattacataaggaacattgaactgttagaggagtgctcttccaaacaaaacaaaaatgtctctaggtttagtcagagctttcacaagtaataacctttctgtattaaaatcagagtaaccctttctgtattgagtgcagtgttttttactcttttctcatgcacatgttacgttggagaaaatgtttacaaaaatggttttgttacactaatgcgcaccacatatttatggtttattttaagtgactttttatgggttatttaggttttcgtcttagttgtagcacacttaccctaattttgccaattattaatttgctaaatagtaatacaaatgacaaactgcattaaatttactaattataaaagctgcaaagcagactggtggcaagtacacagcccttttttttgcagtgctaacttgtctactgtgtattatgaaaattactgttgtccccccacccttttttccttaaataaagtaaaaatgacacctaaaaaaaaaaaaaaaaaaaaaaaaaaaaaaaaaaaaa

SEQ ID NO: 28030 - DNA, 3910 bp, Homo Sapiens; identical to SEQ ID NO: 26862

SEQ ID NO: 28031 - DNA, 2360 bp, Homo Sapiens
ccgcaaaaggctgtccctcccaaacctgggattctgggctcactgagttcacctgcgagtcagccctacctgcactgctctggtctagtacaaacaggctgctggcattgaggtctgctacaatgctgctgctgcacagagctgtggtcctcaggctccaacaggcctgcagactcaagtcaatcccctcaaggatctgcattcaggcctgctccacaaatgattcatttcagccccagcgccccagcctcaccttctctggtgataactccagcacccagggatggagagtcatggggaccctattaggtctcggtgcagtgttggcctatcaggaccatcggtgtagggctgctcaggagtcaacacacatatacactaaggaggaagtgagttcccacaccagccctgagactgggatctgggtgactctgggctctgaggtctttgatgtcacagaatttgtggacctacatccaggggggccttcaaagctgatgctagcagctgggggtcccctagagcccttctgggccctctatgctgttcacaaccagtcccatgtgcgtgagttactggctcagtacaagattggggagctgaatcctgaagacaaggtagcccccaccgtggagacctctgacccttatgctgatgatcctgtacgtcacccagccctgaaggtcaacagccagcggccctttaatgcagagcctccccctgagctgctgacagaaaactacatcacacccaaccctatcttcttcacccggaaccatctgcctgtacctaacctggatccagacacctatcgcttacacgtagtaggagcacctgggggtcagtcactgtctctttccctggatgacttgcacaactttcccaggtacgagatcacagtcactctgcagtgtgccggcaaccgacgctctgagatgactcaggtcaaagaagtaaaaggtctggagtggagaacaggagccatcagcactgcacgctgggctggggcacggctctgtgatgtgttagcccaggctggccaccaactctgtgaaactgaggcccacgtctgctttgagggactggactcagaccctactgggactgcctatggagcatccatccctctggctcgggccatggaccctgaagctgaggtcctgctggcatatgagatgaatgggcagcctctgccacgtgaccacggcttccctgtgcgtgtggtggttcctggagtggtgggtgcccgccatgtcaaatggctgggcagagtgagtgtgcagccagaggaaagttacagccactggcaacggcgggattacaaaggcttctctccatctgtggactgggagactgtagattttgactctgctccatccattcaggaacttcctgtccagtccgccatcacagagccccgggatggagagactgtagaatcaggggaggtgaccatcaagggctatgcatggagtggtggtggcagggctgtgatccgggtggatgtgtctctggatgggggcctaacctggcaggtggctaagctggatggagaggaacagcgccccaggaaggcctgggcatggcgtctgtggcagttgaaagcccctgtgccagctggacaaaaggaactgaacattgtttgtaaggctgtggatgatggttacaatgtgcagccagacaccgtggccccaatctggaacctgcgaggtgttctcagcaatgcctggcatcgtgtccatgtctatgtctccccatgagcatggaaaggagccacctccacccctttccccacccattagcctcactgcttcagaaaaatctttcccacctttcaacttcttggatcacaactctggccttcctaagccatacccaagtacacatatagcacatttcacccaaggaccttccctctttggacactatgttacatacccctcttggcctttgaacctgtgccaggaagtgtgagctgttacagcaaggggctagaagtgaaaaaagtaattctggagacaagcactattttctcttcctaccccacctccatttctaatgcctactgccatcaaggccttgttttgcttttctttttggattgttcagagaaatgtgtgtggcatgtgtaagaaaagtgtatatactatcttatactacctctccaggttgccagagagttgcgaggagagcaaggggcacaaccgtctccctttatagttctacttttctaataaatagtctgtttaagatcataaaaaaaaaaaaaaaaaaaaaaaaaaaaaaaaaaaaaaaaaaaaaaaaaaaaaaaaaaaaaaaaaaaaaaaaaaaaaaaaaaaaaaaaaaaaaaaaaaaaaaaa

SEQ ID NO: 28032 - DNA, 5233 bp, Homo Sapiens
ctgaacaactgctagaaaagatccagaaggagcccacagctgtgctgaaagatgaggccatggttctgcatctcactctgggaaagtataatgaattttcagtttcccttttaaatgaggatccgaagagtctagatatatttataaaagctgtgcacacaacaaaggaactttacgcgggaatgccaaccattcagatcacagcccttgaaaagattacaaaaccattttttgcagccatatcagatgaaaaagttcagcagaagcttttaagaatgttgtttgatttattggtgaactgtaaaaactcacattgtgctcagactgtcagcagtgtttttaaagggatttccgttaatgctgaacaagtccgaatagaactggagccaccagataaagctaaacccttgggcacagttcagcaaaaaagaaggcaaaaaatgcagcagaaaaaatcacaagatctagaatctgttcaggaagttggaggttcttactggcaaagagtaactctcatcctggaattactgcagcacaaaaagaagctcagaagtcctcagatattggtgccaactctttttaacttgctatcaagatgtttagaacccttgccacaagagcagggaaatatggaatacaccaaacaattaattcttagttgtctgctcaacatctgccaaaaactatctccagatggtggcaaaatacccaaagatattttagatgaggagaagttcaacgtggagttgatagttcagtgcatccgcctttcggagatgccgcagacccatcaccatgcccttttacttttgggcactgttgctggaatatttccggataaagttttacacaatatcatgtctatttttacatttatgggagccaatgtcatgcgcctagatgatacttacagttttcaagttattaacaagacagtgaaaatggttattcccgcacttattcagtctgatagtggagattctatagaagtttcaagaaacgttgaagagattgtggtaaaaatcattagtgtatttgtggatgcgctgccacacgtcccggagcacaggcgcctgcccatccttgttcaacttgttgatacactgggtgcagagaaattcctctggattctcctcatcttgctttttgaacagtatgtcacaaaaacagtgctggcggctgcctatggcgaaaaggatgctattttagaagcagacactgaattttggttttcagtctgttgtgagtttagtgtccagcatcagatacaaagcttgatgaatatcctccagtacttactaaagctgccagaggaaaaagaagaaaccattcccaaagcagtgtcatttaataagagtgaatcacaagaagaaatgctacaggtttttaatgtagagactcacactagcaagcaactgcggcattttaaatttttgtcagtgtccttcatgtctcagctcctgtcttccaataattttctgaaaaaggtagttgagagtggtggtcctgagattttaaaaggccttgaagagaggttgctggagaccgttctcggctatatcagtgcagttgcacagtccatggaaaggaacgcagacaaactcaccgtgaagttctggcgcgcgctccttagtaaagcttacgacctgttagataaggtcaatgccttgctgcccacagagacattcattcctgtgatcagagggctggtgggcaatcccctgccatctgttcgccgcaaagcgctggaccttttgaataacaagctgcagcaaaatatatcctggaagaagacaatagttacccgtttcctaaaactggttccagaccttttggccattgtgcagcgtaagaaaaaggaaggggaagaagaacaagcaatcaacagacagacagcgttgtataccttaaagcttttatgcaagaattttggtgcagaaaatccagatccttttgtcccagtgctgagcactgctgtgaaactgattgctccagagagaaaggaggagaagaatgtcttgggaagcgcgctgctgtgcatagcagaggtgacctccaccctggaggcgctggccatcccccagcttcccagcctgatgccatcgttgctgacaacaatgaagaacaccagcgagctggtctccagcgaggtctacctgctcagtgccttggctgctctgcagaaggttgtggagactctcccgcacttcatcagcccctatctggaaggcattctctcccaggtgattcatctggagaaaatcactagtgaaatgggttctgcgtcacaggctaatatccgtctcacatctcttaaaaagacactggctaccacacttgcaccccgagtcctgttgcccgccatcaaaaaaacttacaagcagattgagaagaactggaagaatcacatgggtccgtttatgagcatcttgcaagagcatattggggcgatgaagaaggaagagctcacctcccatcagtctcagctaaccgcctttttcctggaggccctggacttccgagcccagcactctgagaacgatctggaggaagttggaaaaacggaaaattgtatcattgactgtctagtagccatggttgtcaaactttccgaggtcacattcaggcccctgttcttcaagctgtttgattgggctaaaacagaagatgccccaaaggacaggttgttgacattttacaacttggcagattgcattgctgaaaagctgaaagggctttttactctgtttgccggccacttagtgaagccttttgctgacaccttggaccaggtgaacatctccaaaacagatgaagcattttttgactctgaaaatgaccctgaaaagtgctgcttgctgttgcagtttattttgaactgtttatacaaaatcttcctttttgatacccagcattttataagtaaagagagagcaggagccttgatgatgcctctggtggatcagctggaaaacaggcttgggggagaagagaaattccaggaacgggtgacaaagcacctgataccatgcatcgcacagttttcagtggccatggcggatgactctctttggaaaccactgaactaccagattctgctaaagacgagagactcctcgcctaaggttcgatttgctgctttgattactgtgttagcactggctgaaaaactaaaggagaattatattgtcttgctaccagaatccattcctttcttagcagagttgatggaagatgaatgtgaagaagtagaacatcagtgccaaaagactattcagcaactggaaactgtcctgggagagccactccagagctatttctaagactttctgtggtgtttcatactctactcagagttcacactcatatttcatatttttatttttgggtgttgggtgccatgttacttttggtgccttaatacacctacttggattacttacaaatgttttatcacttcgttacaaaatccccacctggcttgtgctgccacataagcctctcctgcctatcgtatagagctgcagaaagagtaaatgatacacggtatttttatacagactgctgtgtttgtttaaacatttattattctcttcctgattgatggtaataatattagacttgttaattttagcacccaaagctgacgcctcatttgcactgtaagccttaactcttctgtacagcagtatcttatatacatggtatccatgttgcagatttcactcaaagttgctctatttcaagaaaatgaagttatttagcaatcaacagaagtacttttgactgtaaagcctacttttcattttgggtaggcgaacttcagccttcgtttctttgttgtgcccataaagagaagtggttctggaatgctttttttaacccaggagtgtgactgtcacctttatcctttgttcttttgggaaacgggagagatgaaggcaacacgctgcttctaaaacagctcatacctggctgctcacacagagggcccagaaacactgggtggcacgaggaagctcctccaggattcagaatgaacccagttccattggtggttaactaagaactacttgtctaagaaagtaagtatcagtagatttttttcaatgctttgaagtgccctaatctctagtactgggtcatggtgaagttggaaagtgagggttcaaataaaattagatctgccccctttttaaaggcatctaagaacatcccgtagaatgttcgcattgagtttaaaagcctttgaagctaatatagaagtttaatgcagaaatgtggcaagcaaaaggccaacttgcattttagagacagagcttgctagtatagaagtgcatatttctaagaaatgtctcagtaaaattcattaataaatactaatagctttttaaatttttttcctccacgtaaaatgaaaatgaacttaagacttacaaggaatgatgtgagtgggctatttttttcctaaatgcctcacagtctccaacagctcagttaagcactctgatggtctttatggagaaaaataactctgggggattctcgagtcttcttgccttctacagctttccctgtggcaccctccacccccaaccagtgtctttgagcttggtgagactctgcatacattaatatgaaaagctggaaaagaattaagggctagcaatttctacactgagtacttttaaaaaaataagattgacaatggtattcttttcaatatatggatagaaataatatctaaaatctgttctgaaaatattcctaaatcctggcagagttctgccccagtctaatgtgataaaatgatcctcactgactgagcttttttccctccccactcccaaacctttgaaatttcctgtaacaagatctgacctgtaaagatcccatatacatggaacttctgccaactcccctcaaataatagaaaaatcacagaaatggaaccatttaacttgctgatacaggtttgattttaatcacgtaaagtggaagagtgctttgatctcagttgctaatgatgatggactaatctttagaagaacggaggccttgattggtgatttcatgggaacaaaacagatttctgcattacctctgcctgctttgtgggtcccttagttggcgtacactttctgatagtgcctgccttatgaatgcctgaagtctaatcctgaccttactttgttgcccataaatatctttcaaattgaaaaaaaaaaaaaaa

SEQ ID NO: 28033 - DNA, 4002 bp, Homo Sapiens
atcaaatcttaaaaaaaaaaagtcacctacagaactacagaattgttctctcccgctcaagaagggcaagtggactttggcgttaagatgcaggggggtgaaccagtgtccacaatgaaagtctcggagagcgaaggaaagctggagggccaggccacagcggtgaccccgaacaagaacagcagctgtggaggtggaatcagtagcagcagcagcagccgcggtggcagtgcaaaaggctggcagtacagtgatcacatggaaaatgtgtatggctatttaatgaagtataccaaccttgtcactgggtggcagtacaggttttttgttttaaacaatgaagctgggctgttggagtactttgtgaatgaacagtctagaaatcagaaacctagaggaactttgcagcttgcaggagctgtaatatcacccagtgatgaggattctcacaccttcactgtaaacgctgccagtggggaacaatataaactcagagctacagatgcaaaagagcgacagcactgggttagcagacttcagatatgtacacagcatcatactgaagctattggaaagaataatcctcctctgaagtcacggagcttctcacttgcatctagtagtaattctcctatatcgcagaggagaccaagtcaaaatgccatttctttttttaatgttggacattccaaactgcaatcactgagcaaaagaactaatttacctccagaccatcttgtggaagtcagagaaatgatgtctcatgctgaaggacaacaaagagacttaattagacgaattgaatgccttcctacttctggccatcttagttccttggaccaggatctcttaatgctcaaagctacttccatggcaactatgaactgcttaaatgactgctttcatattctccagttacagcatgcatcacatcagaagggctcattgccttcaggaacgacaatcgagtggttagaaccaaagatatctttatcaaaccactataaaaatggagctgaccagccctttgcaactgatcagagtaagccggtggcagtcccagaagagcagcctgttgcagaatctggactattagcgagggagcctgaagaaataaatgcagatgatgagatagaggatacatgtgaccacaaagaggatgacctgggagctgtagaagaacaacgtagtgtcatcctacatctcttgtcacagcttaagctgggcatggatttaacaagagtggtgcttcctacatttatcctagagaagcgttccttgctggaaatgtatgcagactttatgtctcatccagacctatttatagccatcactaatggagccacagctgaggacagaatgattcgctttgttgagtactaccttacctcatttcatgaaggccgtaagggagccattgctaaaaaaccatacaatcctatcattggagaaacatttcactgttcctggaagatgccaaaaagcgaggtagcatccagtgtttttagcagttcttccacccagggagtcacaaatcatgctcctttatcgggggagtctttgacccaggtgggatcagactgttacacagtcagatttgttgctgagcaggtttctcatcatcctccagtctcaggattttatgcagaatgtacagagaggaagatgtgtgtaaatgcgcatgtctggactaagagcaagttcttaggcatgtcaataggcgtgacaatggttggagaaggtatccttagtctgttggagcatggagaagagtacacattttctctaccctgtgcatatgctcggtcaattttgactgttccttgggtagaactgggtggcaaagtcagtgtcaactgtgcaaaaactggatattcagccagcatcacttttcataccaagccattttatggtggcaaactgcatcgggttacagctgaagtaaagcacaacatcaccaacactgtggtatgcagagtgcaaggggaatggaatagtgttcttgagttcacatatagcaatggagagacaaagtatgtggacttgactaaattggcagtgacgaagaaaagagtgagacctctggagaagcaggatccatttgaatccaggcgattgtggaaaaatgtgacagactcgctgagagaatctgaaattgataaggccacagagcataagcataccctggaagaacgtcagaggactgaagaaaggcatcgtactgaaacaggcacaccttggaaaaccaaatattttattaaagagggagatggctgggtttatcataaaccactttggaaaataattccaacaacacaaccagcagagtgacacatactatctaaaactcgaccaaatgaggttcttctctgtttaccctaaatcctcccagaatggagtcattgcactgagtgacctgcttcctgattgcgcagactgaaactagctaaacctgaatgtacctactagggcaccataatactgcagcaagaccaaagtggtaaagaaacacagtggaccttttaccaacctgttcatgtgatgtgagcaataccatcttaaaacttgttacctgaatcagtagatgaatcttttatccagttcttgctcctaaagttaagtttgaatcccctatttttgcacaggggcagcagatacacacaacaatgagaactcagtgactttgatttctttgtagtgaaaagtgaagtctccgtttcagagtttgtgtctttctttctgtccataactgaagtattcactactcttgtaaaccaaccaagaggaggagaaagatgacccagaagtggattcagccattgtgcctgaaatcagtgtttaaaaaaaaaaatcaaccaggttgtggtaacaaggcattctatttcttcaaaaagactgtatgcctgtgtctgaggaacttacctattatccacctctgttggaactctcttttaaaaagtacatttatagattgatcagaattataaccatggagaattttttcttctgagcattttaatatacttgaaaacaacattgacttgaaaaatttcagaacatttttcagtacctagttttattaaatattacacttgagagacactttttaaaaatgtgttaatgtcaatatgatgagattttagcctttctccagaactaaggcattaaagaaaatagcaaatattaaaaaataaaactgttacttttttccttctttcttttcacctttaggttaatatccagtattatgtgttatccctttggataagtatgctttattttacctctgttaaaaattaaaataaatgattctattcatatttgtcagtaattcaaaacttatatgtgtaactgaacgcgcatgtaaggtatggttttatttatttttttttttttttgaggaaatttaaatgctaaagaaacaacgaaatgaaaaggtatcaggaaaaaaagatcaggaagttgtattcaggtacaaatctttttttaaataagtattttgttgaggttgaagaattgctggcaattaaaagaatagagctaattatggctttcatcattcattcatgtatttattgagcacctacttattatggtgctcaacacttgttactgcaagctaccttaatttcccaagagtggtgccttactctgttttttctgatatggtcttccaatcagtgtgtgtaacatacctgttgtttatcagccattgtaggtggctgtgtctgttgcatcatcataagaagtttaagctttgtgctctgataaattgtgttctgttaaagaggttagtaggatgaaaacagcaaaacaataattttttcaacaaattgtaaattataagaaaaagagttggtttgtgtacaacaattttaatgattcccttgttcatttttgctgtgaaatgcactgaaaaaaatcctcaaaatgagttatagttcctgtgttgggaaaattgacaaataataaaactagagaacaaacaaaaaaaaaaaaaaa

SEQ ID NO: 28034 - DNA, 2049 bp, Homo Sapiens
agcaacatggcggctgccgtggtgcagcgcccgggctgagcgacagcaagtgcagcgggctcctaccccgggtgggatcgtcggtgggaccggagcgcgggcgggcgcggccccccgggaccatggccgggtccgacaccgcgcccttcctcagccaggcggatgacccggacgacgggccagtgcctggcaccccggggttgccagggtccacggggaacccgaagtccgaggagcccgaggtcccggaccaggaggggctgcagcgcatcaccggcctgtctcccggccgttcggctctcatagtggcggtgctgtgctacatcaatctcctgaactacatggaccgcttcaccgtggctggcgtccttcccgacatcgagcagttcttcaacatcggggacagtagctctgggctcatccagaccgtgttcatctccagttacatggtgttggcacctgtgtttggctacctgggtgacaggtacaatcggaagtatctcatgtgcgggggcattgccttctggtccctggtgacactggggtcatccttcatccccggagagcatttctggctgctcctcctgacccggggcctggtgggggtcggggaggccagttattccaccatcgcgcccactctcattgccgacctctttgtggccgaccagcggagccggatgctcagcatcttctactttgccattccggtgggcagtggtctgggctacattgcaggctccaaagtgaaggatatggctggagactggcactgggctctgagggtgacaccgggtctaggagtggtgcccgttctgctgctgttcctggtagtgcgggagccgccaaggggagccgtggagcgccactcagatttgccacccctgaaccccacctcgtggtgggcagatctgagggctctggcaagaaatcctagtttcgtcctgtcttccctgggcttcactgctgtggcctttgtcacgggctccctggctctgtgggctccggcattcctgctgcgttcccgcgtggtccttggggagaccccaccctgccttcccggagactcctgctcttcctctgacagtctcatctttggactcatcacctgcctgaccggagtcctgggtgtgggcctgggtgtggagatcagccgccggctccgccactccaacccccgggctgatcccctggtctgtgccactggcctcctgggctctgcacccttcctcttcctgtcccttgcctgcgcccgtggtagcatcgtggccacttatattttcatcttcattggagagaccctcctgtccatgaactgggccatcgtggccgacattctgctgtacgtggtgatccctacccgacgctccaccgccgaggccttccagatcgtgctgtcccacctgctgggtgatgctgggagcccctacctcattggcctgatctctgaccgcctgcgccggaactggcccccctccttcttgtccgagttccgggctctgcagttctcgctcatgctctgcgcgtttgttggggcactgggcggcgcagccttcctgggcaccgccatcttcattgaggccgaccgccggcgggcacagctgcacgtgcagggcctgctgcacgaagcagggtccacagacgaccggattgtggtgccccagcggggccgctccacccgcgtgcccgtggccagtgtgctcatctgagaggctgccgctcacctacctgcacatctgccacagctggccctgggcccaccccacgaagggcctgggcctaaccccttggcctggcccagcttccagagggaccctgggccgtgtgccagctcccagacactacatgggtagctcaggggaggaggtgggggtccaggagggggatccctctccacaggggcagccccaagggctcggtgctatttgtaacggaataaaatttgtagccagaccccaaaaaaaaaaaaaaaaaaaaaaaaaaaaaaaaaaaaaaaaaaaaaaaaaaaaaaaaaaaaaaaaaaaaaaaaaaaaaaaaaaaaaaaaaaaa

SEQ ID NO: 28035 - DNA, 3782 bp, Homo Sapiens
tcgggaggccgctgcgctgcagggcctcgcggagccgcccgcgaccgcgagccgggccctccgcgcggtccatcgcccactggacgccgcccgcggccggaccggttcaacttctcatctttgttcttcttcatatactataggctgtttgctgtggtttagtcaaaaagccatgtagaatgcctgccttttgaagaccacttttaaggtgtctagtaagacagcagcagtattgaaagtttttaaagaatataaccgtgtgtgttggtaacagacagaagaatggaagcattccaggaacttcgtaaaccatcagcacgtttggagtgtgaccattgcagtttcagaggcacagactatgaaaatgtacaaatccatatgggtaccatccatccagaattttgtgatgaaatggatgctggtgggctaggcaaaatgatattttaccagaaaagtgcaaagttatttcactgccataaatgcttcttcaccagcaagatgtactctaatgtatactatcacatcacatccaaacatgcatccccagacaaatggaatgataaaccaaaaaatcagttgaacaaagaaacagatcctgtgaaaagccctcctcttcctgaacaccagaaaataccctgcaattcagcagaaccaaaatccatacctgccctttcaatggaaacacagaaacttggttcagttttgtctccagaatcgccaaaacctactcctcttactcccctggagcctcagaaacctggctctgttgtttctcctgagctacagacacctcttccttctcctgagccttcaaaacctgcctctgtttcttctcctgaacctccaaaatcagtccctgtttgtgagtctcagaaacttgcccctgttccttctccagaaccacagaaacctgcccctgtatctcctgagtcagtaaaggctactcttagtaatcccaaaccccagaagcagtctcatttcccagaaacattggggccaccttcagcctcatctccagagtcaccagttctagctgcttccccagaaccttggggaccatccccagctgcatctccagaatctcggaagtcagcccggactacctcccctgagccaaggaagccatccccttcagagtctcctgaaccttggaagccattccctgctgtctccccagagcctaggagaccagcccccgctgtgtcaccaggctcttggaaaccagggccacctgggtcccctaggccttggaaatccaatccttcagcatcatcaggaccttggaagccagctaaacctgctccatctgtgtctcctggaccttggaaaccaattccttctgtatctcctggaccttggaaaccaactccatctgtgtcttctgcatcctggaaatcttcatcagtctcacccagctcctggaagtctccccctgcatctcctgagtcatggaagtctggcccaccagaactccgaaagacagctcccacgttgtctcctgaacattggaaggcagttcccccagtgtctccagagcttcgcaaacccggcccaccactatccccagagatccgtagtccagcaggatctccagagctcagaaaaccctcagggtcaccagatctttggaagctttctcctgatcagcggaaaacttctcctgcttcacttgatttccctgagtcccagaaaagttcccgtggtggttctcctgatctctggaagtcttccttttttattgagcctcagaaacctgtcttccctgagacccgaaaaccaggtccttctgggccatctgagtcccccaaagcagcctcagatatctggaagcctgttctctctatcgatactgagcctagaaaacctgccctgtttcccgagcctgccaaaacagcccctcctgcttctccagaagcacgcaaacgtgccctttttccagagccccggaagcatgcccttttccctgaactccccaaatctgctctattctcagaatcacagaaggctgttgagcttggtgatgaactacaaatagatgccatagatgatcaaaaatgtgatattttggttcaggaagaacttctagcttcacctaagaaactcttagaagatactttatttccttcctcaaagaagctcaagaaagacaaccaagagagctcagacgctgagcttagtagtagtgagtacataaaaacagatttggatgcgatggatattaagggccaggaatcaagcagtgatcaagagcaggttgatgtggaatccattgattttagcaaagagaacaaaatggacatgactagtccagagcagtctagaaatgtgctacagtttactgaagaaaaagaagcttttatctccgaagaggagattgcaaaatacatgaagcgtggaaaaggaaagtattattgcaaaatttgttgctgtcgtgctatgaaaaaaggtgctgttttgcatcatttggttaataagcataatgttcatagcccttacaaatgcacaatctgtggaaaggcttttcttttggaatctctccttaaaaatcatgtagcagcccatgggcaaagtttacttaaatgtccacgttgtaattttgaatcaaatttcccaagaggttttaagaaacatttaactcattgtcaaagccggcataatgaagaggcaaataaaaagctaatggaagctcttgaaccgccactggaggagcagcaaatttgataacacagtgtgaatatttgttctacaaaggtgtttgttggaaccattctttgtaagtatagcttatcagatagcatagttggatcagtagatgacatgtatggtgtaccgtgtttcactgtctcagttgtgttactaagaatgagcatttgatcatttttttctggtctctgtctatgtgactatcttgtaagtcaataaatttctgtatagtccagatggattaaacttctcatttcttttaaatatgtatgaataataatacaaggaagtaggcattccatttaataatcaagagcaagttgtactcaaagcattcagttaaagtgtatctgtgtgtggaactaatttcagacaatagaaaatattagttgaaatgtttaagaattaggcatgaaaaataaatttgagaaattttgtttccttacatgtatttttaaatcataagagttattttctatctgatgtaaaattagtttataaatcttaatcagcttctagatgtttattagcttttatgtcatgaaatgttggagtctcagggttgctgattttctgctaatgggaaaaattgactaagtctttaaaatagtttgcagccttctcccacaggagacaagtgaaagataagtgtgattttagatctttcttgtccatagttgttttcagtggagtcttccattctgtatcttaccctaagatctggttcttccctccccatccccaccccccacccaccgcctgccagctcacactaatagatgattcttaattgccaaatgtgttagagtttgtatatcctactcctgggccttacatgtcgcctgttggggcttaagaccaggttgataagtaggaactgaaagtcttccagattcacagtagaaaattttatagacatttctgttaaagaaatatatcgattttatgtttttcaattatgttactgtaaataccttgtacctgttcatggattattttattctaaaatattttgtcaaatgtgtatcaaccaaattaaaaagaaaggttttcatgtcaaaaaaaaaaaaaaaaaaaaa

SEQ ID NO: 28036 - DNA, 1948 bp, Homo Sapiens
ggcaaaggcaccatgcctctgcgggatgaaaccctccgagaggtgtgggcctctgacagtgggcatgaagaagaaagcctgagcccggaggccccgcggcgccccaaacagcgacccgccccggcacagaggctaaggaagaagaggacggaggcccccgaatccccctgccccacgggatccaagccccggaagcccggagaggaggaggaggaagaggaggacgaggaggacgaggaagaggaggcagaggaaaagaaagagaaaatccttctgcctcccaagaagcccctgagagagaagagctccgcagacctgaaggagaggagggccaaggcccagggcccaaggggagacctgggaagccctgaccccccaccgaaacctctgcgtgttaggaataaggaagctccagcaggggaggggaccaagatgagaaagaccaagaagaaagggtctggggaggccgacaaggacccctcagggagcccagccagtgcgaggaagagcccagcagccatgtttctggttggggaaggcagtcctgacaagaaagccctgaagaagaaaggcactcccaaaggcgcgaggaaggaggaagaagaggaggaggaggcagctacggtgataaagaacagcaatcaaaagggcaaagccaaaggaaaaggcaaaaagaaagcgaaggaggagagggccccgtctccccccgtggaggtggacgaaccccgggagtttgtgctccggcctgccccccagggccgcacggtgcgctgccggctgacccgggacaaaaagggcatggatcgaggcatgtatccctcctacttcctgcacctggacacggagaagaaggtgttcctcttggctggcaggaaacgaaaacggagcaagacagccaattacctcatctccatcgaccctaccaatctgtcccgaggaggggagaatttcatcgggaagctgaggtccaacctcctggggaaccgcttcacggtctttgacaacgggcagaacccacagcgtgggtacagcactaatgtggcaagccttcggcaggagctggcagctgtgatctatgaaaccaacgtgctgggcttccgtggcccccggcgcatgaccgtcatcattcctggcatgagtgcggagaacgagagggtccccatccggccccgaaatgctagtgacggcctgctggtgcgctggcagaacaagacgctggagagcctcatagaactgcacaacaagccacctgtctggaacgatgacagtggctcctacaccctcaacttccaaggccgggtcacccaggcctcagtcaagaacttccagattgtccacgctgatgaccccgactatatcgtgctgcagttcggccgcgtggcggaggacgccttcaccctagactaccggtacccgctgtgcgccctgcaggccttcgccatcgccctctccagtttcgacgggaagctggcctgcgagtgaccccagcagcccctcagcgcccccagagcccgtcagcgtgggggaaaggattcagtggaggctggcagggtccctccagcaaagctcccgcggaaaactgctcctgtgtcggggctgacctctcactgcctctcggtgacctccgtcctctccccagcctggcacaggccgaggcaggaggagcccggacggcgggtaggacggagatgaagaacatctggagttggagccgcacatctggtctcggagctcgcctgcgccgctgtgcccccctcctccccgcgccccagtcacttcctgtccgggagcagtagtcattgttgttttaacctcccctctccccgggaccgcgctagggctccgaggagctggggcgggctaggaggagggggtaggtgatgggggacgagggccaggcacccacatccccaataaagccgcgtccttggccaaaaaaaaaaaaaaa

SEQ ID NO: 28037 - DNA, 3913 bp, Homo Sapiens
ctttcactggcaagagacggagtcctgggtttcagttccagttgcctgcggtgggctgtgtgagtttgccaaagtcccctgccctctctgggtctcggttccctcgcctgtccacgtgaggttggaggagctgaacgccgacgtcatttttagctaagagggagcagggtccccgagtcgccggcccagggtctgcgcatccgaggccgcgcgccctttcccctcccccacggctcctccgggccccgcactctgcgccccggctgccgcccagcgccctacaccgccctcagggggccctcgcgggctccccccggccgggatgccagtgccccgcgccacgcgcgcctgctcccgcgccgcctgccctgcagcctgcccgcggcgcctttatacccagcgggctcggcgctcactaatgtttaactcggggccgaaacttgccagcggcgagtgactccaccgcccggagcagcggtgcaggacgcgcgtctccgccgcccgcggtgacttctgcctgcgctccttctctgaacgctcacttccgaggagacgccgacgatgaagacaccgtggaaggttcttctgggactgctgggtgctgctgcgcttgtcaccatcatcaccgtgcccgtggttctgctgaacaaaggcacagatgatgctacagctgacagtcgcaaaacttacactctaactgattacttaaaaaatacttatagactgaagttatactccttaagatggatttcagatcatgaatatctctacaaacaagaaaataatatcttggtattcaatgctgaatatggaaacagctcagttttcttggagaacagtacatttgatgagtttggacattctatcaatgattattcaatatctcctgatgggcagtttattctcttagaatacaactacgtgaagcaatggaggcattcctacacagcttcatatgacatttatgatttaaataaaaggcagctgattacagaagagaggattccaaacaacacacagtgggtcacatggtcaccagtgggtcataaattggcatatgtttggaacaatgacatttatgttaaaattgaaccaaatttaccaagttacagaatcacatggacggggaaagaagatataatatataatggaataactgactgggtttatgaagaggaagtcttcagtgcctactctgctctgtggtggtctccaaacggcacttttttagcatatgcccaatttaacgacacagaagtcccacttattgaatactccttctactctgatgagtcactgcagtacccaaagactgtacgggttccatatccaaaggcaggagctgtgaatccaactgtaaagttctttgttgtaaatacagactctctcagctcagtcaccaatgcaacttccatacaaatcactgctcctgcttctatgttgataggggatcactacttgtgtgatgtgacatgggcaacacaagaaagaatttctttgcagtggctcaggaggattcagaactattcggtcatggatatttgtgactatgatgaatccagtggaagatggaactgcttagtggcacggcaacacattgaaatgagtactactggctgggttggaagatttaggccttcagaacctcattttacccttgatggtaatagcttctacaagatcatcagcaatgaagaaggttacagacacatttgctatttccaaatagataaaaaagactgcacatttattacaaaaggcacctgggaagtcatcgggatagaagctctaaccagtgattatctatactacattagtaatgaatataaaggaatgccaggaggaaggaatctttataaaatccaacttagtgactatacaaaagtgacatgcctcagttgtgagctgaatccggaaaggtgtcagtactattctgtgtcattcagtaaagaggcgaagtattatcagctgagatgttccggtcctggtctgcccctctatactctacacagcagcgtgaatgataaagggctgagagtcctggaagacaattcagctttggataaaatgctgcagaatgtccagatgccctccaaaaaactggacttcattattttgaatgaaacaaaattttggtatcagatgatcttgcctcctcattttgataaatccaagaaatatcctctactattagatgtgtatgcaggcccatgtagtcaaaaagcagacactgtcttcagactgaactgggccacttaccttgcaagcacagaaaacattatagtagctagctttgatggcagaggaagtggttaccaaggagataagatcatgcatgcaatcaacagaagactgggaacatttgaagttgaagatcaaattgaagcagccagacaattttcaaaaatgggatttgtggacaacaaacgaattgcaatttggggctggtcatatggagggtacgtaacctcaatggtcctgggatcgggaagtggcgtgttcaagtgtggaatagccgtggcgcctgtatcccggtgggagtactatgactcagtgtacacagaacgttacatgggtctcccaactccagaagacaaccttgaccattacagaaattcaacagtcatgagcagagctgaaaattttaaacaagttgagtacctccttattcatggaacagcagatgataacgttcactttcagcagtcagctcagatctccaaagccctggtcgatgttggagtggatttccaggcaatgtggtatactgatgaagaccatggaatagctagcagcacagcacaccaacatatatatacccacatgagccacttcataaaacaatgtttctctttaccttagcacctcaaaataccatgccatttaaagcttattaaaactcatttttgttttcattatctcaaaactgcactgtcaagatgatgatgatctttaaaatacacactcaaatcaagaaacttaaggttacctttgttcccaaatttcatacctatcatcttaagtagggacttctgtcttcacaacagattattaccttacagaagtttgaattatccggtcgggttttattgtttaaaatcatttctgcatcagctgctgaaacaacaaataggaattgtttttatggaggctttgcatagattccctgagcaggattttaatctttttctaactggactggttcaaatgttgttctcttctttaaagggatggcaagatgtgggcagtgatgtcactagggcagggacaggataagagggattagggagagaagatagcagggcatggctgggaacccaagtccaagcataccaacacgagcaggctactgtcagctcccctcggagaagagctgttcacagccagactggcacagttttctgagaaagactattcaaacagtctcaggaaatcaaatatgcaaagcactgacttctaagtaaaaccacagcagttgaaaagactccaaagaaatgtaagggaaactgccagcaacgcaggcccccaggtgccagttatggctataggtgctacaaaaacacagcaagggtgatgggaaagcattgtaaatgtgcttttaaaaaaaaatactgatgttcctagtgaaagaggcagcttgaaactgagatgtgaacacatcagcttgccctgttaaaagatgaaaatatttgtatcacaaatcttaacttgaaggagtccttgcatcaatttttcttatttcatttctttgagtgtcttaattaaaagaatattttaacttccttggactcattttaaaaaatggaacataaaatacaatgttatgtattattattcccattctacatactatggaatttctcccagtcatttaataaatgtgccttcattttttcagaaaaaaaaaaaaaaa

SEQ ID NO: 28038 - DNA, 1157 bp, Homo Sapiens
ggggttaactcgcacgcgcgctcttgtggcggaggtagagtgcgccgtccagggctagagcaagcgcggccccgcggcccggagccatgctgaggagctgcgccgcgcgcctccgcacgctgggggctctgtgccggccgccagtaggccggcgcctgccgggaagcgagccgcgacccgagctgaggtcattttcttctgaggaagtcattcttaaggactgttctgtccccaaccccagctggaacaaggacctaagactgctctttgaccagtttatgaagaaatgtgaagatggctcctggaaacgtttgccttcatataaacgtacacctactgaatggattcaagacttcaaaacccattttcttgacccaaagcttatgaaagaagaacaaatgtcacaggcccagctcttcaccagaagctttgatgatggcctgggctttgaatacgtgatgttctacaatgacattgagaaaaggatggtttgcttatttcaaggaggcccttacctggaaggaccacctggattcattcatggaggtgccattgcaaccatgattgatgctactgttggtatgtgtgcaatgatggctgggggaatcgtcatgactgccaatctcaacatcaattataaaagacctatccctctttgttctgttgttatgataaatagccaacttgataaagttgaaggaaggaaattttttgtttcctgtaatgttcagagtgttgatgagaagaccctatactcagaggcgacaagcttatttataaagctgaatcctgctaaaagtctgacataaagagctgctggtgaactccatctcattctcgcccctccagaagaagcagttgtcccccaaatactctgctccctcactgctgaatccctgtagggagaagcctgccaacagtgaccttccgaaacagccttctgaatacaaagaggattcagtttccatcttctcaactttttaacacagaaacacttcctgcgagcatatcgacaactctcgggccaggcgctgtggctcacacctataatcccagcactttaggaggccgaggcaggcggattgcctgagctcaggagttcaagatcagtctgggcaacacgatgaaactccgtctctactaaaaaaaaaaaaaaa

SEQ ID NO: 28039 - DNA, 4747 bp, Homo Sapiens
cgcgggctgcaggcgcgatgcttggctagaggacgcgtccgacggcggccggacgctgaggtggtcggggctagtcagcccggcctgggcatggagcgcggggtggcagagcctctggacgtttggggcgcgcccagtccgagcccccggcgcgcctgaagttgcgagcggcgagcggcgagcggcgagcggcccgcggagacccaggagctgccggcacgccgcggatgagccttcgcgccggcgggaagacgcggcggtggccagggccagagcaggcggcccgcgggggccgatccggcggagagcagagcccgaggcgaggcgaggcgaggcgcggcgccgctgcacacacgcacacggagccatggggcgccatgttgccaccagctgccacgtggcctggcttttggtgctgatctctggatgctggggccaggtgaaccggctgcccttcttcaccaaccacttctttgatacatacctgctgatcagcgaggacacgcctgtgggttcttctgtgacccagttgctggcccaagacatggacaatgaccccctggtgtttggcgtgtctggggaggaggcctctcgcttctttgcagtggagcctgacactggcgtggtgtggctccggcagccactggacagagagaccaagtcagagttcaccgtggagttctctgtcagcgaccaccagggggtgatcacacggaaggtgaacatccaggtcggggatgtgaatgacaacgcgcccacatttcacaatcagccctacagcgtccgcatccctgagaatacaccagtggggacgcccatcttcatcgtgaatgccacagaccccgacttgggggcagggggcagcgtcctctactccttccagcccccctcccaattcttcgccattgacagcgcccgcggtatcgtcacagtgatccgggagctggactacgagaccacacaggcctaccagctcacggtcaacgccacagatcaagacaagaccaggcctctgtccaccctggccaacttggccatcatcatcacagatgtccaggacatggaccccatcttcatcaacctgccttacagcaccaacatctacgagcattctcctccgggcacgacggtgcgcatcatcaccgccatagaccaggataaaggacgtccccggggcattggctacaccatcgtttcagggaataccaacagcatctttgccctggactacatcagcggagtgctgaccttgaatggcctgctggaccgggagaaccccctgtacagccatggcttcatcctgactgtgaagggcacggagctgaacgatgaccgcaccccatctgacgctacagtcaccacgaccttcaatatcctggttattgacatcaatgacaatgccccggagttcaacagctccgagtacagcgtggccatcactgagctggcacaggtcggctttgcccttccactcttcatccaggtggtggacaaggatgagaatttgggcctgaacagcatgtttgaggtgtacttggtggggaacaactcccaccacttcatcatctccccgacctccgtccaggggaaggcggacattcgtattcgggtggccatcccactggactacgagaccgtggaccgctacgactttgatctctttgccaatgagagtgtgcctgaccatgtgggctatgccaaggtgaagatcactctcatcaatgaaaatgacaaccggcccatcttcagccagccactgtacaacatcagcctgtacgagaacgtcaccgtggggacctctgtgctgacagtcctggcaactgacaatgatgcaggcacctttggggaagtcagctacttcttcagtgatgaccctgacaggttctcgctggacaaggacacgggactcatcatgctgattgccaggctggactatgagctcatccagcgcttcaccctgacgatcattgcccgggacgggggcggcgaggagaccacaggccgggtcaggatcaatgtgttggatgtcaacgacaacgtgcccaccttccagaaggatgcctacgtgggtgctctgcgggagaacgagccttctgtcacacagctggtgcggctccgggcaacagatgaagactcccctcccaacaaccagatcacctacagcattgtcagtgcatctgcctttggcagctacttcgacatcagcctgtacgagggctatggagtgatcagcgtcagtcgccccctggattatgaacagatatccaatgggctgatttatctgacggtcatggccatggatgctggcaacccccctctcaacagcaccgtccctgtcaccatcgaggtgtttgatgagaatgacaaccctcccaccttcagcaagcccgcctacttcgtctccgtggtggagaacatcatggcaggagccacggtgctgttcctgaatgccacagacctggaccgctcccgggagtacggccaggagtccatcatctactccttggaaggctccacccagtttcggatcaatgcccgctcaggggaaatcaccaccacgtctctgcttgaccgagagaccaagtctgaatacatcctcatcgttcgcgcagtggacgggggtgtgggccacaaccagaaaactggcatcgccaccgtaaacatcaccctcctggacatcaatgacaaccaccccacgtggaaggacgcaccctactacatcaacctggtggagatgacccctccagactctgatgtgaccacggtggtggctgttgacccagacctgggggagaatggcaccctggtgtacagcatccagccacccaacaagttctacagcctcaacagcaccacgggcaagatccgcaccacccacgccatgctggaccgggagaaccccgacccccatgaggccgagctgatgcgcaaaatcgtcgtctctgttactgactgtggcaggccccctctgaaagccaccagcagtgccacagtgtttgtgaacctcttggatctcaatgacaatgaccccacctttcagaacctgccttttgtggccgaggtgcttgaaggcatcccggcgggggtctccatctaccaagtggtggccatcgacctcgatgagggcctgaacggcctggtgtcctaccgcatgccggtgggcatgccccgcatggacttcctcatcaacagcagcagcggcgtggtggtcaccaccaccgagctggaccgcgagcgcatcgcgaagtaccagctgcgggtggtggccagtgatgcaggcacgcccaccaagagctccaccagcacgctcaccatccatgtgctggatgtgaacgacgagacgcccaccttcttcccggccgtgtacaatgtgtctgtgtccgaggacgtgccacgcgagttccgggtggtctggctgaactgcacggacaacgacgtgggcctcaatgcagagctcagctacttcatcacaggtggcaacgtggatgggaagttcagcgtgggttaccgcgatgccgttgtgagaaccgtggtgggcctggaccgggagaccacagccgcctacatgctcatcctggaggccatcgacaacggccctgtagggaagcgacacacgggcacagccaccgtgttcgtcactgtcctggatgtgaatgacaaccggcccatctttctgcagagcagctatgaggccagcgtccctgaggacatccctgaaggccacagcatcttgcagctgaaagccacggacgcagatgagggcgagtttgggcgtgtgtggtaccgcatcctccatggtaaccatggcaacaacttccggatccatgtcagcaatgggctcctgatgcgagggccccggcccctggaccgggagcggaactcatcccacgtgctgatagtggaggcctacaaccacgacctgggccccatgcggagctccgtcagggtgattgtgtacgtggaggacatcaacgatgaggcccccgtgttcacacagcagcagtacagccgtctggggcttcgagagaccgcaggcattggaacgtcagtcatcgtggtccaagccacagaccgagactctggggatggtggcctggtgaactaccgcatcctgtcgggcgcagaggggaagtttgagattgacgagagcacagggcttatcatcaccgtgaattacctggactacgagaccaagaccagctacatgatgaatgtgtcggccactgaccaggccccgcccttcaaccagggcttctgcagcgtctacatcactctgctcaacgagctggacgaggccgtgcagttctccaatgcctcatacgaggctgccatcctggagaatctggcactgggtactgagattgtgcgggtccaggcctactccatcgacaacctcaaccaaatcacgtaccgcttcgacgcctacaccagcacccaggccaaagccctcttcaagatagacgccatcacggtgaggggctgggggcagggagcaccatttcttccaatctaaccaacattggttgagctccttctgtgtgcacagcactctcctctttgtcataaaatgtccttgagatggccaagtgtggtgttaggtacctgtagtcccagctgcttgagaggctggggcaggaagattgcttcagctcaggagtttggaggctgcagtgagctgcgtttgcaccactgcactccagcccgggcaacagagtgagaccttgtctcttacaaaaaaaaaaaaaaa

SEQ ID NO: 28040 - DNA, 1362 bp, Homo Sapiens
gcggcggggcctgcacgttgactgtgggaaactcggaaacaagctcacatcttcctgtgggaaaccttctagcaacaggatgagtctgcagtggactgcagttgccaccttcctctatgcggaggtctttgttgtgttgcttctctgcattcccttcatttctcctaaaagatggcagaagattttcaagtcccggctggtggagttgttagtgtcctatggcaacaccttctttgtggttctcattgtcatccttgtgctgttggtcatcgatgccgtgcgcgaaattcggaagtatgatgatgtgacggaaaaggtgaacctccagaacaatcccggggccatggagcacttccacatgaagcttttccgtgcccagaggaatctctacattgctggcttttccttgctgctgtccttcctgcttagacgcctggtgactctcatttcgcagcaggccacgctgctggcctccaatgaagcctttaaaaagcaggcggagagtgctagtgaggcggccaagaagtacatggaggagaatgaccagctcaagaagggagctgctgttgacggaggcaagttggatgtcgggaatgctgaggtgaagttggaggaagagaacaggagcctgaaggctgacctgcagaagctaaaggacgagctggccagcactaagcaaaaactagagaaagctgaaaaccaggttctggccatgcggaagcagtctgagggcctcaccaaggagtacgaccgcttgctggaggagcacgcaaagctgcaggctgcagtagatggtcccatggacaagaaggaagagtaagggcctccttcctcccctgcctgcagctggcttccacctggcacgtgcctgctgcttcctgagagcccggcctctccctccagtacttctgtttgtgcccttctgcttcccccattcccttccacagctcatagctcgtcatctcggcccttgtccacactctccaagcacattacaggggacctgattgctacacgttcagaatgcgtttgctgtcatcctgcttggcctggccaggcctggcacagccttggcttccacgcctgagcgtggagagcacgagttagttgtagtccggcttgcggtggggctgacttcctgttggtttgagcccctttttgttttgccctctgggtgttttctttggtcccgcaggagggtgggtggagcaggtggactggagtttctcttgagggcaataaaagttgtcatggtgaaaaaaaaaaaaaaaaaaaaaaaaaaaaaaaaaaaaaaaaaaaaaaaaaaaaaaaaaaaaaaaaaaaaaaaaaaaaaaaaaaaaaaaaaaaaaaaaaaaaaaaaaa

SEQ ID NO: 28041 - DNA, 3607 bp, Homo Sapiens
cgtgagttgagcgctgctgctccgcggtggagtcaccgcaccgctcccgggatcatggtgttctacttcaccagcagcagcgttaattcatctgcctacactatttacatgggaaaagataaatatgaaaatgaagatctgatcaagcatggctggcctgaagatatctggtttcatgtggacaaactctcttcggctcatgtataccttcgattacataagggagagaatatagaagacatcccaaaggaagtgctgatggactgtgcccaccttgtgaaggccaatagcattcaaggctgcaagatgaacaacgttaatgtggtatatacgccgtggtctaacctgaagaaaacagctgacatggatgtggggcagataggctttcacaggcagaaggatgtaaaaattgtgacagtggagaagaaagtaaatgagatcctgaaccgattagaaaagaccaaagtcgagcggttcccagacctagcagcagagaaagaatgcagagatcgtgaagagaggaatgagaaaaaagcccaaattcaggaaatgaaaaagagagaaaaagaagaaatgaagaagaagagggaaatggatgaacttaggagctattcatcactaatgaaagttgaaaatatgtcttcaaatcaggatggcaatgattcagatgaattcatgtaaaaggagaaaaggagaaaaggacctttgaaagatgtgaatgtagagacaattgcagaccttttggtttcatctgtgttctgaagtataaaatacaaccaaaattctaccttcatcctacccagaaattattgattttcaagttttaaaaaaattgtacctttttttgctgacagaaaaggatcagatatgtataaaatagttgaacttgacagcatataacttaaagtgaaaatgtttttgccagaacatgtcttggtaccttgtgaaagcaggctgcccttgttcttgagatagactttaaaatgaaccagctctgaaaagtacttctgctgctctggtctatccctgaaaacagatgtcttgaaacacttttcatattcttaaaataatcttcacttctgttaagaagaacatgttagtgggtaattatgcgaatgtttccctgtccctgatttctcgattaggcgtatgggttttgaaaaagagatttttcagaagattgtcagcttcagtattcacgttccatcgtgtcatctgggtctgttagtgtagtgaccctcagtgcagtctgtcccagcgtttacgtccttgcttcctctgagcagaggcctccatcttagtatcaacatatttaaagaaattgatggtgttcatcaagctggggcctgtggcagttgttgcctgagcaccaagtaacccaagccacctatgtgacaacttctgggcccaggagtaatttctcagcattgagggtaaaataggatggagtgctctgttgatcatttgggagatgtaggttacctgatttgtgccttaggatgcagcgtgaagcagaagtccatattgcaattatgattttagaaggaactaagcattttactcacacccacagcagcaagaatgacctcctgcagcagatattccacctgtaatagcactttggaactgtgggcaaaaccaaaaggctagtgtttccatttattccatgttggtgtatggggttgaactggaaaattccctgaggcaaaactcactggccaaattttgagagggtatagaaaatgactttagagatgagtggttttgtgtatgtgtctgatgatattcagtctgatgttccgcaattttaaaagttataataaaataccatttttttaatctggaaggacattgatatatgaattcttagaatttgctattaaaaagggtagcccccattccacaagctggttttgagggtgatcttgctctaaaaaacctcattcatcataggctcagtctgacaggttctgtacggggctatcatctttctcctcctctgctaaatgcctctttcttccagctgctcactgggtcaaagggatgtcctttctcagatgtattcttgatacatctcagatgtattcgtagctgtgctccttccatacttccaaggagtccggcttctacagaattcctctgtacctcacactgcaacacatgtagatagcgcttttgaaaaatacatatatttttactatagtatgagaggtcctggggctcaaactttaaacatttcctaactcagcttacactggtttaaaatgtccaggtctctgctgaattctcttgttgaattcatagctctccaacctcctctgtgttgattcctatgcccctaaccctgcagcctctttgttttatttttttccccatctctgttggtcccagggaaagcaaggaaattttcttttgaggacttataggttgattgcccacaggtcaaactgttggcattgaactcctctcatttcttgccattggattgtttcctaaacgttggataggagaattcgaaattgttgctatttttatgagctgtgcccttgatcaaatctgtgctgtgggtctgagtcattttgccaatgtcgtcttcagtttcaacactctgatcagcatgcaggcgaggggcatgtttaatttacttcactaactgctatattctatagctttagacttcatatttcttatccacctttgtctaggctcacgatctttgggcaagggagctttgtcaccgtggttgggctagaacaaatattgagaagtttaccaacacagatgttgagaagtttattgaaaggcactgacattagcagaataagtgatggacattagttgaaccccttcagtgtctatgtgttttattgtattgtctttaactcgttcttgaagcacagatttcagcgagcctttcagctattcagtgccagcggttttccccactcaggaaagatggtgtgagccatacacacagcaggattagacggggagagtttcagctgcagcttctagtttaagaccaaagcccttcctcccgctgctgcatctgtctgagaggggaagctcttgttttccaagctggaaccgtttatgaggaaaactgagcagggtggcaaaatggaaaaggaacaattttctagtttttcctacgcgtgatattgacgcgtgctttttctttgatttgaggtacagcatgtaaataacaaatttccatattcaaaatgatcatattagagtgactgagtgaccttttgattttgaagcagactaaaatctgaccagaccacaatgaaaagtataaaattagaaacttaaattccaagctaaatttcagctttgacccacctaactccagtgaataggtggcagctcagaaacaaggacagcactgctgctgccagagcaagctcacatccagctggcacttcgtgagagctccttcctgccgggcacgtgtgagttcagcgtgggcaagagacttttatgcacattctgtcattcaaaagggaaatgatgccaaccccagatgcagcatgtcctgaatgaatgatctgtaaaatacaataataaaagcttatagtttgagtagaaaaaaaaaaaaaaa

SEQ ID NO: 28042 - DNA, 2331 bp, Homo Sapiens
gcggctgcagtggtggtggcgggtaccgcacggggtatggtccccgggtccgagggcccggcccgcgccgggagcgtggtggccgacgtggtgtttgtgattgagggtacggccaacctgggaccctacttcgaggggctccgcaagcactacctgctcccggccatcgagtattttaatggtggtcctcctgctgagacggacttcgggggagactatggggggacccagtacagcctcgtggtgttcaacacagtggactgcgctcccgagtcctacgtacaatgtcacgctcccaccagcagcgcctatgagtttgtcacctggctcgatggcattaagttcatgggcgggggtggtgagagctgcagcctcatcgcggaaggactcagcacagccttgcagctgtttgatgacttcaagaagatgcgcgagcagattggccagacgcaccgggtctgcctcctcatctgcaactcacccccatacttgttgcctgctgttgagagcaccacgtactctggatgcacaactgagaatcttgtgcagcagattggggagcgggggatccacttctccattgtgtctccccggaagctgcctgcgcttcggcttctgtttgagaaggcagcccccccggccttgctggagccgctgcagcctccgacagatgtgagccaggacccgaggcacatggtgctggttcggggactcgtgctgcctgttgggggtggctcagccccaggccccctccagtcaaagcagccagtccccctgcctcccgccgcaccctcaggtgccactctctcagcagccccccagcagcctctgccccccgtccccccgcagtaccaggttcccgggaacctgagtgcagctcaggtggccgcgcagaatgcagtggaggctgccaagaaccagaaggctgggctgggccctcgcttctcgcccatcacccctctccaacaagctgctcccggagtgggtccccccttcagccaggccccagctccccaactacccccaggaccccctggcgcccccaagccaccacctgcttcccagcccagtctggtctccactgtggcccctggctccggcctggctcccacggcacagcccggggcaccgtccatggcaggcactgtggccccaggaggggtgagcggcccttccccagcccagctgggagccccagccctcggtgggcagcagtcagtctccaataagcttctggcctggagcggggtcctggagtggcaagagaaacccaaacctgcctcagtggatgccaacaccaagctgacgcggtcactgccctgccaggtctacgtgaatcatggcgagaacctgaagacggagcagtggccccagaagctgatcatgcagctcatcccccagcagctgctgaccaccctgggccctttgttccggaactcaaggatggtccagttccatttcaccaacaaggacctggagtctctcaaaggcctctaccgcatcatgggcaacggcttcgcgggctgcgtgcacttcccccacacggcgccctgtgaggtgcgcgtgctcatgctcctgtactcgtccaagaagaagatcttcatgggcctcatcccctacgaccagagcggcttcgtcaacggcatccggcaggtcatcaccaaccacaagcaggtccagcagcagaagctggagcagcagcagcgaggaatggggggacagcaggcacccccagggctggggcccattctggaggaccaagccaggccctcacagaatctgctccagctccgcccaccgcagccccagcctcagggtaccgtaggggcctctggggccacggggcagccccagccccaaggtactgcccagcccccgccaggtgcccctcaaggccctcctggagcagcttctggcccaccccctcctggacccatccttcggccccagaaccctggggccaaccctcagctgcgaagcctcctcctcaacccaccaccgccgcagactggggtgcccccaccccaggcctccctccaccacctccagccaccaggggctcctgcgctgctgcctccgccgcaccagggcctggggcagccccagttggggcccccactcctgcatccaccacctgcccagtcctggcccgcacaacttccccctcgggctccactgccaggtcagatgctgctgagcgggggtccccggggcccggtcccccagccgggcctgcagcccagcgtcatggaggacgacatcctcatggatctcatctgaatccccaacacccaataaagttcctttttaacacaaaaaaaaaaaaaaaaa

SEQ ID NO: 28043 - DNA, 3066 bp, Homo Sapiens
ggctgggaccgagtcccggacgtcgcgacgcgcagggggctgctgcggccggcggtctcgggaaaagtgaggggacggaggcgcccaagcaacgtgggtttcgggaactgctcttcagcaaaagcccttgtcagtttaaaagaaggaagcttatctaacacgtggaatgaaaagtacagttctttacagaaaacacctgtttggaaaggcaggaatacaagctctgctgtggaaatgcctttcagaaattcaaaacgaagtcgacttttttctgatgaagatgataggcaaataaatacaaggtcacctaaaagaaaccagagggttgcaatggttccacagaaatttacagcaacaatgtcaacaccagataagaaagcttcacagaagattggttttcgattacgtaatctgctcaagcttcctaaagcacataaatggtgtatatacgagtggttctattcaaatatagataaaccactttttgaaggtgataatgacttttgtgtatgtctaaaggaatcttttcctaatttgaaaacaagaaagttaacaagagtagaatggggaaaaattcggcggcttatgggaaaaccacggagatgttcttctgcattttttgaggaagagagatcagcattaaaacagaaacggcagaaaataaggctcttacaacaaaggaaagttgcagatgtttcacaattcaaagatctcccagatgaaattcctttgcctctggttattggaacgaaagttacagcacgattacgtggtgttcatgatggtttgttcactggacaaatagatgctgtggatactcttaatgctacttatagagtaacttttgataggacagggcttggaacccataccatccctgactatgaagttctcagtaatgaacctcatgagacaatgccaattgctgcctttggacaaaaacagcggccttctcgattttttatgaccccaccacggttacattatactcctcctctccagtcaccaattatagataatgatcctttattaggacagtcgccgtggagaagtaaaatttctggctctgacactgaaacattaggtggttttccagtagaatttcttatccaagtgaccagattatcaaaaattctcatgattaaaaaggaacatatcaagaaattaagggaaatgaacacagaagcagaaaaattgaaatcatattccatgcccatcagcattgaatttcagcggagatatgcaacaattgttctggagcttgaacagctgaacaaggacctaaacaaagttttgcataaagttcaacagtattgctatgagcttgctccagaccaggggctccagcctgcagatcagccaacagatatgagacgcaggtgtgaggaagaagcacaggaaattgttcggcatgcaaattcctcaacaggacagccctgcgttgaaaatgaaaatctgacagacttaatttccaggcttacagctattttgttacaaattaagtgtctagcagaaggaggagacctgaattcctttgaattcaaatcacttacagactcattaaatgatatcaagagtacaatagacgcttctaatatcagttgctttcagaataatgtagaaatccatgttgcacatattcagagtggcctgagccagatgggaaacttacatgcctttgcagcaaataacaccaacagagactgagtaaagatttcattattccaactgcacgggacattgtttttgagaagttcttttcctttatataggcttccaacaccaaataacctaactgctggaaaacaagggaaatttaaatctccaaataaggcattttaatagactgtactgcttcttaaaccagcattgctgaccagcattatatttatttttcttttattattcagatgcagtagcattgcttatgttacatatgtttatattcacaaatatttttaaactgaaatatctgaacataatataatttcgtggaagaatacattgaccattttttttaatgtgcatgaattcaccgcaacacatgcagacaactgctgcaatggagagtatgaagaaacctggtctttttattcatgtcggtggcagtgtggaaattccatccagaaaattacaactccacttgatttagttgatcaccatctcagtcttcaaaagataacatcatgaggtgtgggaagtcctagttttaaggaaaccactgaaatatagatgggaaatgtggactttacaagtatatgttatatatacttgcaatgtgacatggttctgtagatcattttataataataaatattttaatttatcataacatataaaagaaacctttgttgtttgttgaaagaaaatgaaggaacagggggaaaaaaggtgcaaaatgctaaatttctaaaaatggatttggcatgtcttcccatcagttcaggtcaaaagtgcattgttgtgagatttattaaaaaaaaaatgataacacactattttcatatttttttgtttatttgcacaacttttaaaccagattactggttaaaatccaacagtacacaatttataaagtaaaaagattttataaggaaaacaaatataataaccagtgctgtgaaatgcagaagaaaggcttgttttggttgtttttcttttttaggaaaaccctgcctaaaatgttaatcttgtaaaaagtatgtatttggaattttcttcgttttaatagaatattataaagtcaaaatataaatttttttcaaatttggagtttaagatatagctgtagaggtggttttaattcctttagatgtctcataaaatgagactttttatatgttaatgtataataaaactgaaacaagattattttccatttgaaatttttgtatagtttaaaaaggcttccgtattctttgttggtattgtgccactgcagaactttagtgcagagtttatatttagctaaactgttatgttaattaagaaatgcataaatcttctattcttaatatttgtaattctaaataaattgatctatgaaaattaaaaaaaaaaaaaaaa

SEQ ID NO: 28044 - DNA, 2440 bp, Homo Sapiens
gttactggccattccaaaggctatggatttgtggaatacatgaaaaaggactttgctgcaaaggctagactggagctattgggtagacagttgggagcatcagcactctttgcacaatggatggatgttaatctattggcttcagagctcattcattctaagtgcctttgtattgataaactccccagtgactacagggattcagaagagctgttgcaaattttttccagtgtccataaacctgtgttttgccagcttgcacaggatgaaggtagttacgttggtggctttgcagtggttgaatatagcactgcggagcaggctgaagaggtccagcaggcagcagacggtatgaccatcaagggcagcaaagtccaggtttccttctgtgctcctggagcgccagggcgaagtacattagcagcattgatagcggctcaacgtgtgatgcacagtaatcaaaagggcttacttccagagccaaatccagtacaaattatgaaaagtttaaacaaccctgccatgttgcaagttcttctacagccccagttatgtggacgagctgttaaaccagccgttcttggaacacctcacagcttgccacatctgatgaatccatccatctctcctgcatttttacatttgaataaagcacatcagagctcagttatgggtaatacttctaatttattccttcagaatctttctcatataccactggcacaacaacaattaatgaagtttgagaatattcatactaataataaacccggcttacttggagagcccccagctgtggtacttcagactgcactagggatagggtcagtgcttccattgaaaaaggagttgggacatcatcatggagaagcacataaaacatctagcctgattccaactcaaacaacgataacagctggaatgggcatgttaccattctttccaaatcagcacattgctggacaggctgggccagggcacagtaatactcaggagaaacagccagccacggtgggaatggcagaaggaaatttctcagggtcgcagccttatcttcagagctttccaaaccttgctgctggaagcttgctggtgggacaccataagcagcagcaaagccagccaaaaggcacagagataagttcaggggctgcctctaagaatcaaacttcactcttgggagaaccaccaaaagaaattcggctcagtaaaaatccatacttgaatttggcaagtgtgttgcccagtgtgtgcttatcatcccctgcaagtaaaaccactcttcataagactggaattgcaagcagcattctggatgcaatctctcagggaagtgaatcacaacacgcattggaaaagtgcattgcttattctccaccttttggtgattatgcacaggtgtcatctttaagaaatgaaaagcgaggctcatcatatctcatctctgccccagaaggtggttcagtggaatgtgttgaccagcattctcagggcacaggagcatattacatggaaacttacttaaaaaagaagcgagtatactgagttaagctctctcctaataaccccctaaggttctctgcagtatctctgctgttcatcgctgccttaacttcattcaaactagccatatcctttaaatacgggtttatagtttcccagaaggaactgtgttgtgcagcaggcagaaatgccaaataaaaaatagcaataagaagagacatcaattgaggacattttccactagagtcagatgcatcttaatcagtgtgctaacttacaatccattggagaaactaacaatgttccaatattccttgatttaggactgggaataattctgacaccatatataaaagaagtttgaagcaataaatgggaaacagtgttgtttcctgagccttagaagaatgagtttcttataagccaatgtgcatttcaatttactttccctagaagtaattgcatttatagatttttaggacttttcctagaactacaagggtgcaagtaccaaatgtgctgatggtaatattataaagatgctctacatgcacactcaattacgcccacaccagccatgcaaaattaaacccggtaagagagtgacagtgatatccaaggtatccactactaccgatgctttaagatgttgtttaccatttataccttctgtgaaaaatagaaggtattttaagaaaagtaactttggtgatctaataaaagggtttggcaaactacaccctgggtccacatttggtctaccacccgcttttgtgctgcctgcaagctaagactaatgtttacatttttaaatggttggaggaaaaaagaaaacttatgacatgaaatttatatgaaattcagatttcagtgtccataaataaacttttattgggaaaaaaaaaaaaaaaaaaaaaaaaaaaaaaaaaaaaaaaaa

SEQ ID NO: 28045 - DNA, 3338 bp, Homo Sapiens
gacgccaccgggcgctgacagacctatggagagtcagggtgtgcctcccgggccttatcgggccaccaagctgtggaatgaagttaccacatcttttcgagcaggaatgcctctaagaaaacacagacaacactttaaaaaatatggcaattgtttcacagcaggagaagcagtggattggctttatgacctattaagaaataatagcaattttggtcctgaagttacaaggcaacagactatccaactgttgaggaaatttcttaagaatcatgtaattgaagatatcaaagggaggtggggatcagaaaatgttgatgataacaaccagctcttcagatttcctgcaacttcgccacttaaaactctaccacgaaggtatccagaattgagaaaaaacaacatagagaacttttccaaagataaagatagcatttttaaattacgaaacttatctcgtagaactcctaaaaggcatggattacatttatctcaggaaaatggcgagaaaataaagcatgaaataatcaatgaagatcaagaaaatgcaattgataatagagaactaagccaggaagatgttgaagaagtttggagatatgttattctgatctacctgcaaaccattttaggtgtgccatccctagaagaagtcataaatccaaaacaagtaattccccaatatataatgtacaacatggccaatacaagtaaacgtggagtagttatactacaaaacaaatcagatgacctccctcactgggtattatctgccatgaagtgcctagcaaattggccaagaagcaatgatatgaataatccaacttatgttggatttgaacgagatgtattcagaacaatcgcagattattttctagatctccctgaacctctacttacttttgaatattacgaattatttgtaaacattttgggcttgctgcaacctcatttagagagggttgccatcgatgctctacagttatgttgtttgttacttcccccaccaaatcgtagaaagcttcaacttttaatgcgtatgatttcccgaatgagtcaaaatgttgatatgcccaaacttcatgatgcaatgggtacgaggtcactgatgatacataccttttctcgatgtgtgttatgctgtgctgaagaagtggatcttgatgagcttcttgctggaagattagtttctttcttaatggatcatcatcaggaaattcttcaagtaccctcttacttacagactgcagtggaaaaacatcttgactacttaaaaaagggacatattgaaaatcctggagatggactatttgctcctttgccaacttactcatactgtaagcagattagtgctcaggagtttgatgagcaaaaagtttctacctctcaagctgcaattgcagaacttttagaaaatattattaaaaacaggagtttacctctaaaggagaaaagaaaaaaactaaaacagtttcagaaggaatatcctttgatatatcagaaaagatttccaaccacggagagtgaagcagcactttttggtgacaaacctacaatcaagcaaccaatgctgattttaagaaaaccaaagttccgtagtctaagataactaactgaattaaaaattatgtaatacttgtggaactttgataaatgaagccatatctgagaatgtagctactcaaaaggaagtctgtcattaataaggtatttctaaataaacacattatgtaaggaagtgccaaaatagttatcaatgtgagactcttaggaaactaactagatctcaattgagagcacataacaatagatgataccaaatactttttgtttttaacacagctatccagtaaggctatcatgatgtgtgctaaaattttatttacttgaattttgaaaactgagctgtgttagggattaaactataattctgttcttaaaagaaaatttatctgcaaatgtgcaagttctgagatattagctaatgaattagttgtttggggttacttctttgtttctaagtataagaatgtgaagaatatttgaaaactcaatgaaataattctcagctgccaaatgttgcactcttttatatattctttttccacttttgatctatttatatatatgtatgtgtttttaaaatatgtgtatattttatcagatttggttttgccttaaatattatccccaattgcttcagtcattcatttgttcagtatatatattttgaattctagttttcataatctattagaagatggggatataaaagaagtataaggcaatcatatattcattcaaaagatatttatttagcaactgctatgtgcctttcgttgttccagatatgcagagacaatgataaataaaacatataatctcttccataaggtatttattttttaatcaagggagatacacctatcagatgtttaaaataacaacactacccactgaaatcagggcatatagaatcattcagctaaagagtgacttctatgatgatggaacaggtctctaagctagtggttttcaaactggtacacattagactcacccgaggaattttaaaacagcctatatgcccagggcctaacttacactaattaaatctgaattttggggatgttgtatagggattagtattttttttaatctaggtgattccaatattcagccaactgtgagaatcaatggcctaaatgctttttataaacatttttataagtgtcaagataatggcacattgactttattttttcattggaagaaaatgcctgccaagtataaatgactctcatcttaaaacaaggttcttcaggtttctgcttgattgacttggtacaaacttgaagcaagttgccttctaatttttactccaagattgtttcatatctattccttaagtgtaaagaaatatataatgcatggtttgtaataaaatcttaatgtttaatgactgttctcatttctcaatgtaatttcatactgtttctctataaaatgatagtattccatttaacattactgatttttattaaaaacctggacagaaaattataaattataaatatgactttatcctggctataaaattattgaaccaaaatgaattctttctaaggcatttgaatactaaaacgtttattgtttatagatatgtaaaatgtggattatgttgcaaattgagattaaaattatttggggttttgtaacaatataattttgcttttgtattatagacaaatatataaataataaaggcaggcaactttcatttgcaaaaaaaaaaaaaaaaaaaaaaaaaaaaaaaaaaaaaaaaaaaaaaaaaaaaa

SEQ ID NO: 28046 - DNA, 1038 bp, Homo Sapiens
gccgggcaccggggcggcgggttggtctacgctgtgcgcggcggacgtcggaggcagcggggagcggagcggggccgccggggcctctccagggccgcagcggcagcagttgggccccccgccccggccggcggaccgaagaacgcaggaagggggccggggggacccgcccccggccggccgcagccatgaactccaacgtggagaacctacccccgcacatcatccgcctggtgtacaaggaggtgacgacactgaccgcagacccacccgatggcatcaaggtctttcccaacgaggaggacctcaccgacctccaggtcaccatcgagggccctgaggggaccccatatgctggaggtctgttccgcatgaaactcctgctggggaaggacttccctgcctccccacccaagggctacttcctgaccaagatcttccacccgaacgtgggcgccaatggcgagatctgcgtcaacgtgctcaagagggactggacggctgagctgggcatccgacacgtactgctgaccatcaagtgcctgctgatccaccctaaccccgagtctgcactcaacgaggaggcgggccgcctgctcttggagaactacgaggagtatgcggctcgggcccgtctgctcacagagatccacgggggcgccggcgggcccagcggcagggccgaagccggtcgggccctggccagtggcactgaagcttcctccaccgaccctggggccccagggggcccgggaggggctgagggtcccatggccaagaagcatgctggcgagcgcgataagaagctggcggccaagaaaaagacggacaagaagcgggcgctgcggcggctgtagtgggctctcttcctccttccaccgtgaccccaacctctcctgtcccctccctccaactctgtctctaagttatttaaattatggctggggtcggggagggtacagggggcactgggacctggatttgtttttctaaataaagttggaaaagcaaaaaaaaaaaaaaaaaaaaaaaaaaaaa

SEQ ID NO: 28047 - DNA, 1406 bp, Homo Sapiens
cttctgtgagcagcgaggattttgatatgagcgactccacatggatgtcagctgacccgcacctggcctccagcctgagccccagccaggacgagaggatgcggagcccgcagaacctccacagtcaagaggacgatgactcctcctctgagagtggcagcggcaatggctcctccaccctgaacccatccacgtcgagcagcacgcagggcgaccctgccttccccgagatgaatggcaacggcgccgtggcccccatggacttcaccacggccgccgaggatcagcccatcaacctgtgtgacaagctcccgccggccacggcacttggcacagcctcctacccctcggatggctgcggtgccgacgggctgcggagccgcgtcaaatacggggtgaagaccacccccgagtcccccccctacagctctgggagctacgattccatcaagaccgaggtcagcggctgccctgaggacctgacagtgggccgggccccgacggcagatgatgacgacgatgaccacgatgaccatgaggacaatgacaagatgaacgactctgaaggcatggaccctgagcgtcttaaggccttcaacatgtttgtgcgtctctttgtggacgagaacctggaccgcatggtgcccatctccaagcagcccaaggagaagatccaggccatcatcgagtcctgcagccggcagttccctgagttccaggagcgggcccgcaagcgcatccgcacgtacctcaagtcctgccgtcgcatgaagaagaacggcatggagatgaccagacccacgccaccccatctgacctcggccatggcagaaaacatcctggcagctgcctgtgagagcgagacaagaaaggcagccaagcggatgcgtctagagatctaccagtcctcacaggatgagcccatagccctggacaagcagcactcgcgggactccgcagccatcacccactccacctactcactgccagcctcctcctactcccaggaccctgtgtacgccaacggcggcctcaactacagttaccgcgggtacggggccttgagcagcaacctgcagccccctgcctccctccaaacaggaaaccacagtaatgggcccacggacctcagcatgaaaggcggggcctctaccacctccaccacccccagcgccttgtcgggggagcccccaacaaggcgctggggctgcagctctgtttagaatcaccttcgtggaccctgatgttagaatcccacccccagataattacctttcaagtcttaggtgagcagaattgcatatttattgagaaaagcaaagtggaccctttcttcctctccccttagtaatttatttttctgaaaatggaaaaaaaaaaaaaaaaaaaaaaaaaaaaaaaaaaaa

SEQ ID NO: 28048 - DNA, 1836 bp, Homo Sapiens
cggacgcgtgggcagccttgagtccattgccaaattttcagcacacctgccagcaacttgggggaataagcgaaggtttccctacaagagggaaagaaggcaaaaacggcacagctatctccaaacacatctgagttcatttcaaaagtgaccaagggaatctccgcacaaaagtgcagattgaggaattgtgatgggtcattcccaagaatcccccaaggggcatcccaaatccctgaggagtaacagctgcaaacctggtcagttctcagtgagagccagctcacttatagctttgctgctagaacctgtgtggctgcatttcctggtggccagtgacaactgtgtaaccagaatagctgcatggcgctgaccctttggccggaacttggtctcttggctccctccttggccacccaccacctctcgcacagcccctctgtttttacaccaataacaagaattaagggggaagccctggcagctatacgttttcaaccagactcctttgccgggacccagcccgccaccctgctcgcctccgtcaaacccccggccaatgcagtgagcaccatgtagctcccttgatttaaaaaaaataaaaaataaaaaaaaaaggaaaaaaaaatacaacacacacacaaaaataaaaaaaatattctaatgaatgtatctttctaaaggactgacgttcaatcaaatatctgaaaatactaaaggtcaaaaccttgtcagatgttaacttctaagttcggtttgggatttttttttttttaatagaaatcaagttgtttttgtttttaaggaaaagcgggtcattgcaaagggctgggtgtaattttatgtttcatttccttcattttaaagcaatacaaggttatggagcagatggttttgtgccgaatcatgaatactagtcaagtcacacactctggaaacttgcaactttttgtttgttttggttttcaaataaatataaatatgatatatataggaactaatatagtaatgcaccatgtaacaaagcctagttcagtccatggcttttaattctcttaacactatagataaggattgtgttacagttgctagtagcggcaggaagatgtcaggctcactttcctctgattcccgaaatggggggaacctctaaccataaaggaatggtagaacagtccattcctcggatcagagaaaaatgcagacatggtgtcacctggatttttttctgcccatgaatgttgccagtcagtacctgtcctccttgtttctctatttttggttatgaatgttggggttaccacctgcatttaggggaaaattgtgttctgtgctttcctggtatcttgttccgaggtactctagttctgtctttcaaccaagaaaatagaattgtggtgtttcttttattgaacttttaacagtctctttagtaaatacaggtagttgaataattgtttcaagagctcaacagatgacaagcttcttttctagaaataagacattttttgacaactttatcatgtataacagatctgttttttttccttgtgttcttccaagcttctggttagagaaaaagagaaaaaaaaaaaaggaaaatgtgtctaaagtccatcagtgttaactccctgtgacagggatgaaggaaaatactttaatagttcaaaaaataataatgctgaaagctctctacgaaagactgaatgtaaaagtaaaaagtgtacatagttgtaaaaaaaaggagtttttaaacatgtttattttctatgcacttttttttatttaagtgatagtttaattaataaacatgtcaagtttaaaaaaaaaaaaaaa

SEQ ID NO: 28049 - DNA, 5745 bp, Homo Sapiens
gtggcctgcccaacgtgtgctgggtgggagaaggcgaggcggcagcgatgctgtctcttccgtgaggagcgcagaggaggtcgcggcgccggaggccccagaaggctcgaaggcgccgcgggctggggtcggtggcttagggagcccgtccggccatggtggccgcgggtggtggttggcgcggctgcgctgcggcccggggcagtgcggagccgggacagtcgcggcgctgacgcccgcgggccccagctgcagatatgaagcggagccgctgccgcgaccgaccgcagccgccgccgcccgaccgccgggaggatggagttcagcgggcagcggagctgtctcagtctttgccgccgcgccggcgagcgccgcccgggaggcagcggctggaggagcggacgggccccgcggggcccgagggcaaggagcaggatgtagtaactggagttagtcccctgctcttcaggaaactcagtaatcctgacatattttcatccactggaaaagttaaacttcagcgacaactgagtcaggatgattgtaagttatggagaggaaacctggccagctctctatcgggtaagcagctgctccctttgtccagcagtgtacatagcagtgtgggacaggtgacttggcagtcgtcaggagaagcatcaaacctggttcgaatgagaaaccagtcccttggacagtctgcaccttctcttactgctggcctgaaggagttgagccttccaagaagaggcagcttttgtcggacaagtaaccgcaagagcttgattgtgacctctagcacatcacctacactaccacggccacactcaccactccatggccacacaggtaacagtcctttggacagcccccggaatttctctccaaatgcacctgctcacttttcttttgttcctgcccgtaggactgatgggcggcgctggtctttggcctctttgccctcttcaggatatggaactaacactcctagctccactgtctcatcatcatgctcctcacaggaaaagctgcatcagttgcctttccagcctacagctgatgagctgcactttttgacgaagcatttcagcacagagagcgtaccagatgaggaaggacggcagtccccagccatgcggcctcgctcccggagcctcagtcccggacgatccccagtatcctttgacagtgaaataataatgatgaatcatgtttacaaagaaagattcccaaaggccaccgcacaaatggaagagcgactagcagagtttatttcctccaacactccagacagcgtgctgcccttggcagatggagccctgagctttattcatcatcaggtgattgagatggcccgagactgcctggataaatctcggagtggcctcattacatcacaatacttctacgaacttcaagataatttggagaaacttttacaagatgctcatgagcgctcagagagctcagaagtggcttttgtgatgcagctggtgaaaaagctgatgattatcattgcccgcccagcacgtctcctggaatgcctggagtttgaccctgaagagttctaccaccttttagaagcagctgagggccacgccaaagagggacaagggattaaatgtgacattccccgctacatcgttagccagctgggcctcacccgggatcccctagaagaaatggcccagttgagcagctgtgacagtcctgacactccagagacagatgattctattgagggccatggggcatctctgccatctaaaaagacaccctctgaagaggacttcgagaccattaagctcatcagcaatggcgcctatggggctgtatttctggtgcggcacaagtccacccggcagcgctttgccatgaagaagatcaacaagcagaacctgatcctacggaaccagatccagcaggccttcgtggagcgtgacatactgactttcgctgagaacccctttgtggtcagcatgttctgctcctttgataccaagcgccacttgtgcatggtgatggagtacgttgaagggggagactgtgccactctgctgaagaatattggggccctgcctgtggacatggtgcgtctatactttgcggaaactgtgctggccctggagtacttacacaactatggcatcgtgcaccgtgacctcaagcctgacaacctcctaattacatccatggggcacatcaagctcacggactttggactgtccaaaattggcctcatgagtctgacaacgaacttgtatgagggtcatattgaaaaggatgcccgggaattcctggacaagcaggtatgcgggaccccagaatacattgcgcctgaggtgatcctgcgccagggctatgggaagccagtggactggtgggccatgggcattatcctgtatgagttcctggtgggctgcgtccctttttttggagatactccggaggagctctttgggcaggtgatcagtgatgagattgtgtggcctgagggtgatgaggcactgcccccagacgcccaggacctcacctccaaactgctccaccagaaccctctggagagacttggcacaggcagtgcctatgaggtgaagcagcacccattctttactggtctggactggacaggacttctccgccagaaggctgaatttattcctcagttggagtcagaggatgatactagctattttgacacccgctcagagcgataccaccacatggactcggaggatgaggaagaagtgagtgaggatggctgccttgagatccgccagttctcttcctgctctccaaggttcaacaaggtgtacagcagcatggagcggctctcactgctcgaggagcgccggacaccacccccgaccaagcgcagcctgagtgaggagaaggaggaccattcagatggcctggcagggctcaaaggccgagaccggagctgggtgattggctcccctgagatattacggaagcggctgtcggtgtctgagtcgtcccacacagagagtgactcaagccctccaatgacagtgcgacgccgctgctcaggcctcctggatgcgcctcggttcccggagggccctgaggaggccagcagcaccctcaggaggcaaccacaggagggtatatgggtcctgacacccccatctggagagggggtatctgggcctgtcactgaacactcaggggagcagcggccaaagctggatgaggaagctgttggccggagcagtggttccagtccagctatggagacccgaggccgtgggacctcacagctggctgagggagccacagccaaggccatcagtgacctggctgtgcgtagggcccgccaccggctgctctctggggactcaacagagaagcgcactgctcgccctgtcaacaaagtgatcaagtccgcctcagccacagccctctcactcctcattccttcggaacaccacacctgctccccgttggccagccccatgtccccacattctcagtcgtccaacccatcatcccgggactcttctccaagcagggacttcttgccagcccttggcagcatgaggcctcccatcatcatccaccgagctggcaagaagtatggcttcaccctgcgggccattcgcgtctacatgggtgactccgatgtctacaccgtgcaccatatggtgtggcacgtggaggatggaggtccggccagtgaggcagggcttcgtcaaggtgacctcatcacccatgtcaatggggaacctgtgcatggcctggtgcacacggaggtggtggagctgatcctgaagagtggaaacaaggtggccatttcaacaactcccctggagaacacatccattaaagtggggccagctcggaagggcagctacaaggccaagatggcccgaaggagcaagaggagccgcggcaaggatgggcaagaaagaaaaaggagctccctgttccgcaagatcaccaagcaagcatccctgctccacaccagccgcagcctttcttcccttaaccgctccttgtcatcaggggagagtgggccaggctctcccacacacagccacagcctttccccccgatctcccactcaaggctaccgggtgacccccgatgctgtgcattcagtgggagggaattcatcacagagcagctcccccagctccagcgtgcccagttccccagccggctctgggcacacacggcccagctccctccacggtctggcacccaagctccaacgccagtaccgctctccacggcgcaagtcagcaggcagcatcccactgtcaccactggcccacaccccttctcccccacccccaacagcttcacctcagcggtccccatcgcccctgtctggccatgtagcccaggcctttcccacaaagcttcacttgtcacctcccctgggcaggcaactctcacggcccaagagtgcggagccaccccgttcaccactactcaagagggtgcagtcggctgagaaactggcagcagcacttgccgcctctgagaagaagctagccacctctcgcaagcacagccttgacctgccccactctgaactaaagaaggaactgccgcccagggaagtgagccctctggaggtagttggagccaggagtgtgctgtctggcaagggggccctgccagggaagggggtgctgcagcctgctccctcacgggccctaggcaccctccggcaggaccgagccgaacgacgggagtcgctgcagaagcaagaagccattcgtgaggtggactcctcagaggacgacaccgaggaagggcctgagaacagccagggtgcacaggagctgagcttggcacctcacccagaagtgagccagagtgtggcccctaaaggagcaggagagagtggggaagaggatcctttcccgtccagagaccctaggagcctgggcccaatggtcccaagcctattgacagggatcacactggggcctcccagaatggaaagtcccagtggtccccacaggaggctcgggagcccacaagccattgaggaggctgccagctcctcctcagcaggccccaacctaggtcagtctggagccacagaccccatccctcctgaaggttgctggaaggcccagcacctccacacccaggcactaacagcactttctcccagcacttcgggactcacccccaccagcagttgctctcctcccagctccacctctgggaagctgagcatgtggtcctggaaatcccttattgagggcccagacagggcatccccaagcagaaaggcaaccatggcaggtgggctagccaacctccaggatttggaaaacacaactccagcccagcctaagaacctgtctcccagggagcaggggaagacacagccacctagtgcccccagactggcccatccatcttatgaggatcccagccagggctggctatgggagtctgagtgtgcacaagcagtgaaagaggatccagccctgagcatcacccaagtgcctgatgcctcaggtgacagaaggcaggacgttccatgccgaggctgccccctcacccagaagtctgagcccagcctcaggaggggccaagaaccagggggccatcaaaagcatcgggatttggcattggttccagatgagcttttaaagcaaacatagcagttgtttgccatttcttgcactcagacctgtgtaatatatgctcctggaaaccaaaaaaaaaaaaaaaaaaaaaaaaaaaaaaaaaaaaaaa

SEQ ID NO: 28050 - DNA, 2229 bp, Homo Sapiens
gatcgcgtggagtgaaggtcacgccgcggcgcgattgacttctaaagagtcatgctgtgatgaaaaagcccagaagagaaggaagaggaaagcaaaggagtcagggatggctcttcctcagggacacttaacattcagggacgtggccatagaattctctcaggcggagtggaaatgcctggaccctgcacagagggctttatacaaggatgtgatgttggagaactacaggaacctggtctccctgggaatctctcttcctgacctgaatattaactccatgttggagcaaaggagggagccctggtctggtgagagtgaagtgaaaatagcaaaaaattcagatgggagggagtgcatcaaaggtgtgaacacagggagcagctatgcattgggaagcaatgcagaagacaaaccaattaaaaaacaacttggagtatcctttcacttacatctgtctgaactggagctatttccagatgaaagggtaataaatggatgtaatcaagttgaaaactttatcaaccacagttcctctgtttcctgtcttcaagaaatgtcttccagtgtcaaaacccccatttttaataggaatgattttgatgattcttcatttctcccacaagaacagaaagtacaccttagagaaaaaccttatgaatgtaatgagcatagcaaagtctttagagtatcttccagccttactaaacatcaagtaatccatactgtagagaaaccttacaaatgtaattcatgcggcaaggtctttagtcgcaattcgcaccttgcagaacattgtagaattcatactggagagaaaccttacaaatgtaatgtctgtggcaaggtttttagttacaattcaaactttgcacgacatcaaagaattcataccagagagaagccgtatgaatgtaatgaatgtggtaaagtcttcagtaataattcttaccttgcacgacatcaaagaattcatgctgaagagaaaccttacaaatgtaatgaatgtggtaaaggcttcagtcataagtcatctctagcaaatcattggagaatttatactggagagaagccttacaaatgtgatgaatgtggcaaggccttctataggattgcgctccttgtacgacatcagaaaattcatactggagagaaaccttacaaatgtaatgaatgtggaaaggtctttattcaaaattcgcacctagcacaacattggagaattcatacaggagagaaaccttacaaatgtaatgaatgtggaaaagtatttaatcaactttcaaatcttgcacgacatcgaagaattcatactggagagaagccttacaaatgtaatgaatgtggtaaagcatttagtgagtattcaggcctttcagcccatcttgtaatccacactggagagaagccttacaaatgtagtgaatgtggcaaggcattcagacacaagttatcactaaccaatcatcagagaatccatactggagaaagaccttacaaatgtaatgaatgtggcaaggtcttcaatcgaattgcacaccttgcacgacatcggaaaattcatactggagagaaaccttacaaatgtaatgagtgtggcaaggcctttagtcgcatttcatacctagcacaacattggacaattcatatgggatagaaactacaaatgcaacaaatgcgtcaaagaatttagtgtgcactcaagccttactacccatcttttattccatactgcaaagaaattttgcaaatgtaaagaatatgacaaggtcttcaaacacaagtttttctaataactcattagagaatttatactggagagacttcacaattataataaatgtgtggaaaagtcttcaaaaaaatttcacaccttgcaaaaggagatctaaaaaacacaatcagaaatgacaaaggggacattaccaccaaccccacagaaatacgaaaaaccctcaaagattactataaacacctgtatgcacacaaactagaaaacctagaaaaaattaataaattccttgaaagatataaccccccaagattgaaccaagaagaaattgcatccctgaacagaccaataatgagttccaaaatttaatcactaattaaaaatctatcaaacaaaactctggaccagacattaaagcgtgattttcttaaaaaaaaaaaaaaaaaaaaaaaaaaaaaaaaaaaaaaaaaaaaaaaaaaaaaaaaaaaaaaaaaaaa

SEQ ID NO: 28051 - DNA, 4307 bp, Homo Sapiens
gaacgagcatgaagatttgaaattgctccgattggaaggaagcccaggttaggtttgggcacctccaaacgcacccgttttaaagccacctggactgaggcgtcgagctttcagctccaccaaacgctcacctggcctggcagcgagcggcggaagagcccgggagcccctcacagagcgcaccgagccgggcggagagctgagccgcaggcacccgcgtctccaggatgataggcgacattgcaacaaatctctacacccagcagctcagggggctccaagcagagcagcaagttcgaggatccgggcgtggagccgagtgaggccgcagcccagcgggcctcgggcgaaaaatcttggaaaatgtataccagtcatgaagatattgggtatgattttgaagatggccccaaagacaaaaagacactgaagccccacccaaacattgatggcggatgggcttggatgatggtgctctcctctttctttgtgcacatcctcatcatgggctcccagatggccctgggtgtcctcaacgtggaatggctggaagaattccaccagagccgcggcctgaccgcctgggtcagctccctcagcatgggcatcaccttgatagtgggccctttcatcggcttgttcattaacacctgtgggtgccgccagactgcgatcattggagggctcgtcaactccctgggctgggtgttgagtgcctatgctgcaaacgtgcattatctcttcattacttttggagtcgcagctggcctgggcagcgggatggcctacctgccagcggtggtcatggtgggcaggtatttccagaagagacgcgccctcgcccagggcctcagcaccacggggaccggattcggtacgttcctaatgactgtgctgctgaagtacctgtgcgcagagtacggctggaggaatgccatgttgatccaaggtgccgtttccctaaacctgtgtgtttgtggggcgctcatgaggcccctctctcctggtaaaaacccaaacgacccaggagagaaagatgtgcgtggcctgccagcgcactccacagaatctgtgaagtcaactggacagcagggaagaacagaagagaaggatggtgggctcgggaacgaggagaccctctgcgacctgcaagcccaggagtgccccgatcaggccgggcacaggaagaacatgtgtgccctccggattctgaagactgtcagctggctcaccatgagagtcaggaagggcttcgaggactggtattcgggctactttgggacagcctctctatttacaaatcgaatgtttgtagcctttattttctgggctttgtttgcatacagcagctttgtcatccccttcattcacctcccagaaatcgtcaatttgtataacttatcggagcaaaacgacgttttccctctgacgtcaattatagcaatagttcacatctttggaaaagtgatcctgggcgtcatagccgacttgccttgcattagtgtttggaatgtcttcctgttggccaacttcacccttgtcctcagtatttttattctgccgttgatgcacacgtacgctggcctggcggtcatctgtgcgctgatagggttttccagtggttatttctccctaatgcccgtagtgactgaagacttggttggcattgaacacctggccaatgcctacggcatcatcatctgtgctaatggcatctctgcattgctgggaccaccttttgcagggtggatctatgacatcacgcaaaaatatgatttttccttctacatatgtggtttgctttacatgataggaatactctttttacttattcagccgtgcattcgaattatagaacaatccagaagaaaatacatggatggtgcacatgtttagtatcatgtaatgttccgtgtaggtttcattgtaatactcatgcctacctcgcatggttgctgtgaggcacctatgacaggacgtgggaaagcattttgtacggtaactggcactgtcatttgtaaatgccattgtcacagcctcatttgtaagcagcactgcctctctgtttggggagatgtaatgctggaagatcttaaggactacatacattctagagatgacagtgttgttcaaagacagcctagtaagtaattggtagaaatgcccttataaaaaccattctcttgtcatctactgggactagggttttaaatacagcttttaaaaacaaaaacagggaataaaagcttttcaactcaaccacttctttgtaagacaaaactgaagtatctgtgtgcttccagaaagcttacagataaatgggtttcaagcacaagaatatgaccagatttcagaaattaattattacagggagctattgatctactagcatcaaacaaaggcaagctctaattccacaggtaatacaatttagtgcaattaaagaaacacggcttgtatttttatgagggaattctgcagctagggattgtgactcctaaatcctcctctaaaagaaggcacttgccattaatcctaattcagtgctatccagttataaatggaatcttgagacaaaaccttaacaaagaaataacagtaatgatttccttagcagaagccgtatttgtacgcacaacattaaatcaagggctacaattcaagcacttttattcgtatcattggcctcttagatgatataagcatgaggtggggcctgtaatatttttttctgagtttcttctgcccaaaaatataatatagaactaattgctaactgacaaataaagttaatagttaaatcatctccaaggaatgttgctaatccaaagtataacactatctatttgtgaggataataaatggaatgccattagtgtagatgtctgtgccacatctgacactggagtagtgataacaaatagcccatctctagactctcgtgttgttatatagaccattcatttgcctgagcgtggcacagttttaaaaatagttctcttgattgatttcatacagaagatgactgtgatccatgacatctaataatgccctttctttatctgagatgtctatttttctaagccaaacgtttttcagactgcagaatgttcttcccagatcatttgaaatttctggctgccttacttgtttacagatagtttaagactatttaaatttctactcacaatttgatcatcacacacacacaaatccttgaatatcattgccagtgtcttaggtcaaatttacctaaagtgaatacagcccattctcaattatccttcacaattagacgcaggaatgctactaggaattggaatcaaacaatgccaccccaagcgtaattttagccagcagtttcagttatactcaaccatgcccttctgagctgttaacaagtgattcaatggacaagttctctttttgttccatctccattatttcctgctctaatgtatagtgggagtggttgtgtaatgaaaggaccaccaaaataataaaaggcagctaatggaaaggagagacaaaagcatggttaatatatatacttaatattacctccaatgactcgggaattgcctgtaaattattatagacaatagattgcatgtcatactccatttggttcaacacaacaacctatgtgttatcattacagctttggctgctgttaaagaatccagctctctattttgataaagataatcttaaagctgaggcaatgctccctcctctatctctctctgtgtaatttaccatagaattaggatgattagattgaaacacatgttgtatgttttaaaaactacattgcttcattactttcattttccgacaacatcaaactaacaagaggcagtgttaaatattttaaatggtgctatagccaatgtatttgaatgcttgcactgctggttgtgtatcatcaatatgaactttttatccaatgactcaactctaattacatctaagttagacttgctcacgttcagtttgtacagttgtgtgttgacttactatgttttgaaagtggtgacttctaccgaatgagtggaagttcccattgtcaaaaaaaataaagacctgcttgcagtattcatgttgacaacagagtaaaagagaatactgtaaagaattactgcaaatatttcctgtttatgttatttgccgttgtttgaagatattataaagggttaattgtatatttatatcatgtgctttatcgttttcccctcatgtatccaagtaatttttatttacatacaactaaataaatgttgtcctctttgaaaaaaaaaaaaaaa

SEQ ID NO: 28052 - DNA, 4514 bp, Homo Sapiens
gcgcgctcgggcctccgctcttcacgcgccgcattcgtagcccgagagtccgcgccgcggggaggcttggaggcaagcgctgcccgcgagctgagccgccggaggaggagccgcgggcaacgaggtttctctgtcattcacagaaaaatgaatcatttaaacctttggaggactcagttatcacaatacttctctactaccaactaagatttatgatagtaaatttatgagagcaaatttccatgttatagaactgttgaagaactaaaagaggatattctttcatcaaaataattctgcagtatcataatattactaaataaaattaaaaagcacaattattaaattattaaatttgccacacatgtgcagcagctactgtatcctgatagtgaccaaacctcaaatataaatggtttcccttcatgggaaaagccattatatttggaagaaaccactgaacattgttattaaatatattttcagctaactgtcatttaggagaattttcatgaaacaagttctagaaagttccaagtcccaccagtaagtggatttgatattatggcagcaacttacagacttgtggttagtactgtgaaccactacagcagcgtggtgatagaccggcgttttgaacaagctatacattattgcactggaacctgccacaccttcacacatggaattgactgcattgtggtacaccatagtgtttgtgcagacctcttgcacatccctgtgtctcagttcaaagatgcagatctgaactctatgtttctaccccatgaaaatgggctttcttcggctgaaggagactatccccaacaggccttcacaggcatacccagggtcaagagaggatctacatttcagaatacctacaacttaaaggatattgcaggagaagcaatcagttttgccagtgggaaaataaaagaattttcctttgaaaaactcaaaaactctaaccatgcagcttacagaaagggaaggaaagttaagtctgactcatttaataggaggtcagttgatttggacttgctttgtggccattataacaacgatgggaacgccccatcctttggtttactgcggagttcctcagttgaggaaaaacctttgtctcatagaaactcactggatacgaacctgacttccatgtttcttcaaaacttttctgaagaagacttggttactcagattttggaaaaacataaaatagataatttttcttctgggacagacataaagatgtgcttggacatcttattgaaatgctccgaggatttaaaaaaatgcacagacatcataaaacaatgcataaagaaaaaatcagggagtagcatcagtgaaggaagtggtaatgatacaatttctagctctgaaactgtctatatgaatgtaatgaccaggttagcatcctatctgaaaaagttaccatttgaattcatgcagtctgggaataatgaggctctagatttaacagaactgatcagtaatatgcctagcttacaactgactcccttctccccagtgtttggcactgaacaaccccctaaatatgaagatgttgtccagctctcagcttctgactctggacgatttcaaactattgaattgcaaaatgacaagcctaattctaggaagatggacactgtacaatccattccaaacaactccacaaattccttatataacttagaggtaaatgatcctagaactctaaaagctgtccaggtccaatcacagtcattaaccatgaatcctttagaaaatgtttcttctgacgacttaatggaaactctttatattgaagaagagtcagatggaaagaaagcattagataaaggacaaaagacagagaatggacctagtcatgagttattaaaggtaaatgaacatagagcagaatttccagaacatgctactcatcttaaaaaatgccccaccccaatgcaaaatgaaattggtaagatatttgagaaatcatttgttaatctacctaaggaagactgtaaatcaaaagtttctaaatttgaagagggagaccagagagattttacaaattccagtagccaggaagagatagataaattgttaatggatttggaatctttttcacagaagatggagacctctctaagagagccacttgcgaagggtaaaaactctaattttttaaatagtcacagtcagttgaccggtcagacccttgtagatcttgagcctaaatctaaagtctcttcacccatagaaaaagtctcaccttcctgtctaacaaggattattgaaaccaatggacacaaaatagaggaagaggatcgagccctcttactgcgaatcctggaaagcattgaagactttgctcaagaactagttgaatgcaaatcaagcagagggagcctatcacaagaaaaggaaatgatgcaaattctacaggaaaccttgacaacttcctcccaggccaatttatcagtctgtagaagtcctgttggtgataaagccaaagatactacttcagcagttttgattcagcagactccagaggtgatcaagattcaaaataaaccagaaaagaaacctggaacaccactcccacctccagccacctctccaagtagtccccgacctctctccccggttccccatgtgaataatgttgtgaatgcgccattgtccataaacattccacggttctactttcctgaaggactcccagatacctgtagtaatcatgaacaaactctaagcagaattgaaactgctttcatggatattgaagaacagaaagcagacatttatgaaatggggaaaattgcaaaggtctgtggctgtcctctctattggaaagcccccatgttcagggctgcagggggagagaagacaggatttgtgacagcacagtcattcattgccatgtggagaaagttgctgaataaccatcatgatgatgcctctaaattcatctgtcttctagcaaagcccaactgcagctctctagaacaggaggatttcatccctctacttcaggatgtggtggatacccaccctggtctcacgttcctgaaagatgctccagaattccactcccgctacatcaccacggttattcagagaatattctacacagtcaacagatcttggagtggaaaaattacttcgacagagataagaaaaagcaactttttgcaaaccctagcacttttggaagaagaggaagatataaaccaaattacagattacttctcctatgaacatttctatgttatttattgtaaattctgggaactagatactgatcacgacctctacatcagccaggccgatctgtctcgatacaatgaccaggcttcatcaagcaggattattgaaaggatattctctggtgcagtaacaaggggaaaaacaatacagaaagagggaagaatgagctatgcagattttgtttggtttttgatctctgaagaagacaaaaggaatcctaccagcattgagtattggttccgctgcatggatgtggatggagacggtgtactctccatgtatgagctggagtacttctatgaggagcagtgtgaacggatggaagccatgggaattgagcccttgccattccatgatttactgtgccagatgcttgacctagtgaagccagctgttgatggcaaaataactctaagagatctgaagaggtgcagaatggctcacatcttctatgacactttctttaatctggagaaatacttagaccatgaacagagagatccctttgcggtccagaaggatgttgagaacgatgggcctgagccctcagactgggaccggtttgccgctgaggagtatgagacgcttgttgcagagggatctgcccaagcacaattccaggaaggctttgaagattatgaaacagatgaacctgcctctccctctgaatttggaaacaaaagcaataaaatattaagtgcaagccttccagagaaatgtggaaagcttcaatcagtggatgaagaatagctgccggtgtctacaatgaaacgaagatgtgtattttaaatgtttctttcttgtgaagagatgttctcgtttgcatactgctttttaaagactttgatttctccaagtgtgtatcatctgcactaggaactttgtttttaagcaataggtctggatacacatttaacttaggaggctcctccaatttgcctcaaacctcttacggagcttctcctcagaagtggtaccatcgccttccaaagtcagcactctacactcttgaatgtaccaaggatctcttggcgacagtaccaagcacggttctctacacaggtgactgaagttgcctctgtgttggctggcatccctgagtcccctccgggctcctatggagcctagaagaaaccttcacttgcagaaaacttgagtcagaaaattctggaacttgaaaaagtagtaagggcctccagaattgacttagccctagtaataaaagcactgccaaaaaaaaaaaaaaa

SEQ ID NO: 28053 - DNA, 3030 bp, Homo Sapiens
gggcttcgcagcctgaggaaaaaaagagaaaaagataaaaaaaatctgaaaacgcttcaaaatcctgaaaaaaaaaaaaggaaaagaaaaaacgaatcctcggagaacccgcggggaagtcactttcgtacgcttccggcctgccccgcgcccgccgccgcagcgcttggcgtccgtcggtctccgtccgtcggtccgggggtgagccgcccgcccggcccgccgtgccctccccccgctcgggccccgagccccgcgccccgcgcctgccccggcgcaccacgtgtccgtgctgcccttcgccgcccgcccggggctcgccgagtcggcgcccacaaagatttggtttccctctgccccggcggttgtaatcttaaaccgccggagcccgaggcctatatttatagagaaacgcgtgtccccgaggccgccgtgggcagcgtccggtcgcctcttaaaggatttttacccttcggaaggggattccccgtttaatttttttcctactttgattttttgaaatttggagcttcgcaccaggaccgcggagaagtgcaaagtcgcggggagggccgtattgtgcggagagccttttgtctgcggtgctgcggccgtgggagccggcccccgcctcccgtttccgtcccgtctccaagcccgccgactccagctcgtcctcgccgcgccggtgccacctgtgagccgcggcgcgggcccgggctccgaaggcgcccctttgtcctgcggcgggcccgataagaagtcctcctggcggggctcggggtggtggggggcggggagatgaacgctgcggccagcagctaccccatggcctccctgtacgtgggcgacctgcattcggacgtcaccgaggccatgctgtacgaaaagttcagccccgcggggcctgtgctgtccatccgggtctgccgcgatatgatcacccgccgctccctgggctatgcctacgtcaacttccagcagccggccgacgctgagcgggctttggacaccatgaactttgatgtgattaagggaaagccaatccgcatcatgtggtctcagagggatccctctttgagaaaatctggtgtgggaaacgtcttcatcaagaacctggacaaatctatagataacaaggtactttatgatactttttctgcttttggaaacatactgtcctgcaaggtggtgtgtgatgagaacggctctaagggttatgcctttgtccacttcgagacccaagaggctgccgacaaggccatcgagaagatgaatggcatgctcctcaatgaccgcaaagtatttgtgggcagattcaagtctcgcaaagagcgggaagctgagcttggagccaaagccaaggaattcaccaatgtttatatcaaaaactttggggaagaggtggatgatgagagtctgaaagagctattcagtcagtttggtaagaccctaagtgtcaaggtgatgagagatcccaatgggaaatccaaaggctttggctttgtgagttacgaaaaacacgaggatgccaataaggctgtggaagagatgaatggaaaagaaataagtggtaaaatcatatttgtaggccgtgcacaaaagaaagtagaacggcaggcagagttaaaacggaaatttgaacagttgaaacaggagagaattagtcgatatcagggggtgaatctctacattaagaacttggatgacactattgatgatgagaaattaaggaaagaattttctccttttggatcaattaccagtgctaaggtaatgctggaggatggaagaagcaaagggtttggcttcgtctgcttctcatctcctgaagaagcaaccaaagcagtcactgagatgaatggacgcattgtgggctccaagccactatatgttgccctggcccagaggaaggaagagagaaaggctcacctgaccaaccagtatatgcaacgagtggctggaatgagagcacttcctgccaatgccatcttaaatcagttccagcctgcagcgggtggctactttgtgccagcagtcccacaggctcagggaaggcctccatattatacacctaaccagttagcacagatgaggcctaatccacgctggcagcaaggtgggagacctcaaggcttccaaggaatgccaagtgctatacgccagtctgggcctcgtccaactcttcgccatctggctccaactggtaatgctccggcctctcgtggcctccctactaccactcagagagtcggcgttcccacagctgtgcagaacttagcgccacgcgctgctgttgctgctgctgctccccgggctgttgccccctacaaatacgcctccagtgtccgcagccctcatcctgccatacagcctctgcaggcaccccagcctgcggtccatgtgcaggggcaggagccactgactgcctccatgctggctgcagcacccccccaggaacagaagcagatgctgggagaacgcttgttcccactcatccaaacaatgcattcaaatctggctgggaagatcacgggaatgctgctggagatagacaactctgagctgctgcacatgttagagtcccccgagtctctccgctccaaggtggatgaagctgtagcagttctacaggctcatcatgccaagaaagaagctgcccagaaggtgggcgctgttgctgctgctacctcttagacaaggaaaaaccgattcaaaagccaaataaccccttatggaattcaactcaaggtttgaagacttcctagcttgtcctatggacctcaacaccaaggattacaaattgcaaatttaataggtcattttgtatcaaaaggtcaattatgaagcacctagaatttttcaattatacgaatatgttctttgggttctgctgtggcccagacagtgttaactttttttttattgtgggttttgattttttcccccagaaattggttttatttgatgtacccaagtcttacgtttcccaataaagaaaaaaaatctccataaaaaaaaaaaaaaaaa

SEQ ID NO: 28054 - DNA, 4584 bp, Homo Sapiens
agaacgtcgcggaggaggtaagcgtcgcttggcgcctggccgccgcgggcaggatacaccgtgggcctgaggcgcgagcccggcggcgtgcggccctctctccgcgcggagccgagccggaactgcggcagtctctccctgccaggctcttcatccaaggtttctgtggatcccttctgaagttctatctgaaaattgcgcttaagtgaattttctgttagaagaacttggttgctactttcttgtcaagatgattgcaacacctttgaaacattcaagaatttacttacctccagaggcatcttctcaaaggagaaatctacccatggatgcaatcttttttgacagcattccttcaggcacacttactcctgtaaaagatttggtgaaatatcagaactcctccttaaaattgaatgaccataaaaagaatcagttcctaaaaatgacaacttttaacaataaaaatatatttcaatcaactatgctaacagaggctactacctctaacagttctcttgatatcagtgctataaagcccaacaaggatggattaaaaaataaagcaaactatgaatcaccaggaaaaatatttctaagaatgaaagaaaaagtactgcgtgacaagcaagaacagccatcaagaaacagtagtttgttggaaccacagaaaagtggaaataatgaaaccttcactcctaacagagttgaaaaaaaaaaattgcagcatacctacctatgtgaagaaaaggaaaacaacaaatcattccagtcagatgacagttcactaagagcctcagtccaaggagttcctctagaatcatcaaataatgatattttcctcccggtcaaacaaaagattcagtgccagcaggaaaagaaagcaccactgcacaatttaacttacgaacttccaactctgaaccaagaacaggaaaattttttggctgtagaagcccgaaacaagacattaactagagctcagttggctaaacaaatttttcactcaaaggagagtatagttgcaaccactaaatccaaaaaggacacgtttgttttagaaagcgttgattctgctgatgaacaatttcaaaatactaatgctgagactctcagtactaattgtattcctattaaaaatggcagcctgttaatggtttctgatagtgagaggacaacagaagggacttcgcaacagaaagttaaggaaggaaatggaaaaacagtgcctggagagacaggtcttccaggttccatgaaagatacatgtaaaattgtacttgcaacaccaagacttcatataacaatacctcggaggtcaaaaagaaatatttcaaagctttctcctccaagaatatttcaaactgttacaaatggacttaaaaaaaatcaggtagttcagctacaggaatggatgattaaaagcatcaataataatactgctatatgtgtagaaggaaaattgatagacgtcactaacatatattggcacagtaatgtaattatagagcggattgagcacaacaaacttaggactatatcaggcaacgtttatatattaaaaggcatgatagaccaaatttccatgaaagaagcaggatatccaaattatctcataaggaaatttatgtttggatttccagaaaattggaaagagcacattgataattttctggaacaattaagggctggtgaaaagaacagggaaaagaccaaacaaaaacagaaaactggaagatctgtccgtgacataaggaaatcaatgaaaaatgatgcacgagaaaaccaaacagatactgctcaaagagccaccaccacttacgattttgattgtgataatttggaactgaagagtaataagcacagtgagtcaccaggagctacagaattaaacatgtgccacagtaattgccaaaataaaccaacattaaggttcccagatgaccaagtaaataatactattcaaaatggaggaggagatgacttatctaatcaggaattaattggaaaaaaagaatataaaatgtcttcaaagaaactaaaaattggtgaaagaacaaatgaaaggataataaaaagtcagaagcaagagacaactgaagaattggatgtatccattgatattctaacctcaagggaacagtttttctcagatgaagaaagaaaatacatggccatcaatcagaagaaagcttatattttagtaacaccacttaaatctagaaaagtgatagagcaaagatgcatgaggtataatctgtccgctggcaccatcaaagcagtaacagattttgtaataccagagtgtcaaaaaaaaagtcccatcagcaagtccatggggactttagaaaatacatttgaaggtcataaaagtaaaaacaaggaagattgcgatgaacgtgacttacttactgtcaaccggaaaataaaaatatctaaccttgaaaaggaacaaatgctcacctctgactttaagaaaaataccagactattaccaaaattgaagaaaatagaaaatcaggtagctatgtcattttataagcatcagtcctcaccagatttgtcaagtgaagaaagtgaaacagaaaaggaaattaaaaggaaagctgaagttaagaaaaccaaagcaggaaacaccaaagaagcagtggttcacctgagaaagagcacaagaaacacaagtaatattccagtgattttggaacctgaaactgaagaaagtgaaaatgaattttatatcaaacaaaagaaagctagaccttccgtcaaagaaactcttcagaagtctggtgttaggaaagagtttccaattactgaggcagtaggatctgataagacaaataggcatcccttagaatgcttacctggtttaattcaggataaggaatggaatgagaaggagttacagaaacttcattgtgcttttgcatctcttccaaagcacaaacctggtttctggtcagaggtagctgcggctgtaggttctcgatctcctgaagaatgccagaggaaatacatggaaaatcccagaggaaaaggatcccagaaacatgtcactaagaagaagccagccaattccaaaggccaaaatggcaagagaggtgatgctgatcagaaacaaactattaagataactgccaaagtgggaactcttaaaaggaagcaacagatgagggaatttctggaacagttgccaaaagatgaccatgatgattttttcagtacaacacctttacagcatcaaagaatactgttgccaagtttccaggacagtgaagatgatgatgatattctgccaaatatggacaaaaatccaacaactccatcatcagttatctttccattggtaaaaactcctcaatgtcagcatgtcagtcctggcatgctaggttctataaataggaatgactgtgataaatatgtttttcgtatgcaaaaatatcataaaagtaatggtggtattgtctggggcaacatcaagaaaaaattagttgaaactgatttctcaactccaacaccaagaaggaaaaccccatttaacacagacttaggagaaaactctggtattggaaaacttttcactaatgctgtggaatctttagatgaagaagagaaagattattatttttcgaactctgattctgcatagtaaaatgagaaaatatgattcctgggatttttaccataaagcagacagtgtttgtattttcaactggagtacatgtattttctttgtaaagtagcttcctatgaaaatgtggacttttttgaaggtttcatatgtttgtgttcaaagtaaaatatcctcattgctgcagcttactaaaaatgtaaagaaaattgtttttgctcgtgtagatatctgtaaatttgtttttgcatattaaaatatatatagataattttttaataagcatccaagtctgtttactttaagaaaaccatttcccaaacagattttttttttatttcaagaaaattttgctaccatttaagtaagagaaggtgagaaggatgacagaggttgtattggtagctattgaattcatgaaaacttttaagttagcatttgttagcagttattatccaagccagagtaggatttgttaccagttgttatccaaacctaatgtttaaattacacattgttgaaattaaattacacattgttgacatgcttctctcctgattgtttttattttaaacttgtgataggcatatctatgaaacctttgtaaatttagtttattgctttaccattattttactaggtaaaattagagaacagattttgttctctaatttttaagccttatttacatatgcagaaacagcttaaatattttgactagattagacaaacagttaatagatccaccattaggaatcaatatattatgtcataataaacatcctttttctttcactgaaatttcttttagaaataaacttatttttgcttgttatgttttgaaacttgacataggatattttccctctggctacacattcacctacccttgttctctatttagattattcaaataaagttagtttgcttttatagtaaaaaaaaaaaaaaaa

SEQ ID NO: 28055 - DNA, 3071 bp, Homo Sapiens
gcggtgagcacgtcaggggtggggggcgcaggtcaagctttcaccagtttttaattctttgatggggtaaatttgagcaattttctcgacttgtcgacattcgttattaactgagcaggaatcaggagaggaacccggtcctctccacacagcccagcaggtacgccgcccatgtgcctgtggagaagagaggttcctgtggggcagacagagagcctacgactagatttgcatctttacgtcctgcgcggaggctgctacacacatgcagaagtcatgctggtggcctggacagtgaagggagagaagtggatttgggagacatttaggagatggcaccaaaagcgaaggaagctcctgctcatcctaaagccgaagccaaagcgaaggctttaaaggccaagaaggcagtgttgaaaggtgtccgcagccacacgcaaaaaagaagatccgcatgtcactcaccttcaggcggcccaagacactgcgactccggaggcagcccagatatcctcggaagagcacccccaggagaaacaagcttggccactatgctatcatcaagtttccgctggccactgagtcggccgtgaagaagatagaagaaaacaacacgcttgtgttcactgtggatgttaaagccaacaagcaccagatcagacaggctgtgaagaagctctatgacagtgatgtggccaaggtcaccaccctgatttgtcctgataaggagaacaaggcatatgttcgacttgctcctgattatgatgctttcgatgttgtaacaaaattgggatcacctaaactgagtccagctggctaactctaaatatatgtgtatcttttcagcataaaaaaataatgtttttcataagaatgacaacttaattagaatcaaatctataagctttaagattttacgtttctagtaagtataatattagcttatttgactagaactcaagcagaataggaatttatgcttgttttatattcaataatgataattttgaagatatagttgttttattacaccaaaaatactatattaatcttatttaactaagttttatccaaatcatgttaacttaagaaacatttgatcagttcctatatttctaggagtttggtgaatatttatttataaatgcttatttttttccaagccaagttagaatagagcacttttagaggatttcataaatgaattttgcaatgctctctggagttaagaaaatatcacatatacataacatacattaatagatacacaaacacaaatagagatttcatagctttcatcctgaaatttcagccatgaatcaggcataaatattctgatggttaatttcagacatctacttgatcggattgagagacacgcatagctggtcaaacacgatttcagccatgaatcaggcataaatattctgatggttaattttagacatctacttgactggattaagagacacacatagctggtcaaacatgatttctgacatgaatcaggcataaatattctgacggttaattttagacatctacttgactggattaagagacacacatagctggtcaaacatgatttcagccatgaatcagccataaatattctgacggttaattttagacatctacttgatcggattgagagacacacatagctggtcaaacacgatttcagccatgaatcaggcataaatattctgatggttaattttagacatctacttgagtggattgagagacacacatagctggtcaaacacaatttcagccatgaatcaggcataaatattctgatggttaattttagacatctacttgagtggattgagagacacacatagctggtcaaacaatttcagccatgaatcaggcataaatattctgacggttaattttagacatctacttgagtggattgagagacacacatagctggtcaaacacgatttcagccatgaatcaggcataaatattctgacggttaattttagacatcaacttgactggattaagggacacacatagctggtcaaacacgatttcagccatgaatcaggcataaatattctgacggttaatcgtagacgtctacttgactggattgagagacacacatagctggtcaaacacgatttcagccatgaatcaggcataaatattctgatggttaatcgtagacatctacttaactggattgagagacacacatagctggtcaaacacgatttcagccatgaatcaggcataaatattctgatggttaatcgtagacatctacttgactggattgagagacacacatagctggtcaaacacgatttcagccatgaatcaggcataaatattctgatggttaatcgtagacatctacttaactggattgagagacacacatagctggtcaaacacgatttcagccatgaatcaggcataaatattctgatggttaatcgtagacatctacttgactggattgagagacacacatagctggtcaaacacgatttcagccatgaatcaggcataaatattctgatggttaatcgtagacgtctacttgactggattgagagacacacacagctggtcaaacacgatttctgggcatatctatgagggtgtttctggaagacactgagataaccatgacccaatgtggatgggcactgatatggtttggctgtgtccccacccagatctcatcttgaattgtagttcctgtaatacctacatgtcgtgggagggacccaatgggaggtgactgaatcatggtggtggttaccgccatgctgttctcatgacagtgagtgagttctcatgatctgatggttttataaggggcttttcccctttgggtcagcacttcttgttgctgccatgtgaagagggacagctttgcttccccttctgccatgattgtgaggcccctgcagccatgtggaactgtcagcccattaaacccctttgttctttataaaaaaaaaaaaaaaaaaaaaaaaaaaaaaaaaaaaaaaaaaaaaaaaaaaaaaaaaaaaaaaaaaaaaaaaaaaaaaaaaaaaaaa

SEQ ID NO: 28056 - DNA, 3009 bp, Homo Sapiens
aggtgtgcagcccagaccgtgtcaccctctacgggctgatggtcaagcccatccagaggttcccacagttcatactcctgcttcaggacatgctgaagaacacccccaggggccatccggacaggctgtcgctgcagctggccctcacagagctggagacgctggctgagaagctgaacgagcagaagcggctggctgaccaggtggctgagatccagcagctgaccaagagcgtcagtgaccgcagcagcctcaacaagctgttgacctcaggccagcggcagctgctcctgtgtgagacgttgacggagaccgtgtacggtgaccgcgggcagctaattaagtccaaggagcgtcgggtcttcctgctcaacgacatgcttgtctgtgccaacatcaacttcaagggccagctggagatcagcagcctggtgcccctggggcccaagtatgtggtgaagtggaacacggcgctgccccaggtgcaggtggtggaggtgggccaggacggtggcacctatgacaaggacaatgtgctcatccagcactcaggcgccaagaaggcctctgcctcagggcaggctcagaataaggtgtacctcggccccccacgcctcttccaggagctgcaggacctgcagaaggacctggccgtggtggagcagatcacgcttctcatcagcacgctgcacggcacctaccagaacctgaacatgactgtggctcaagactggtgcctggccctgcagaggctgatgcgggtgaaggaggaagagatccactcggccaacaagtgccgtctcaggctcctgcttcctgggaaacccgacaagtccggccgccccattagcttcatggtggttttcatcacccccaaccccctgagcaagatttcctgggtcaacaggttacatttggccaaaatcggactccgggaggagaaccagccaggctggctatgcccggatgaggacaagaagagcaaagccccattctggtgcccgatcctggcctgctgcatccctgccttctcctcccgggcactcagcctgcagcttggggccctggtccacagtcctgtcaactgtcccctgctgggtttctcagcagtcagcacctcccttccacagggctacctctgggtcgggggcggacaggaaggcgcagggggccaggtggaaatcttttccttgaaccggccctcgccccgcaccgtcaagtccttcccactggcagcccctgtgctctgcatggagtatatcccggagctggaggaggaggcggagagcagagacgagagcccgacagttgctgacccctcggccacggtgcatccaaccatctgcctcgggctccaggatggcagcatcctcctctacagcagtgtggacactggcacccagtgcctggtgagctgcaggagcccaggtctgcagcctgtgctctgcctgcgacacagccccttccacctgctcgctggcctgcaggatgggacccttgctgcttaccctcggaccagcggaggtgtcctgtgggacctggagagccctcccgtgtgcctgactgtggggcccgggcctgtccgcaccctgttgagcctggaggatgccgtgtgggccagctgtgggccccgggtcactgtcctggaagccaccaccctgcagcctcagcaaagcttcgaggcgcaccaggacgaggcagtgagcgtgacacacatggtgaaggcgggcagcggcgtctggatggccttctcctccggcacctccatccgcctcttccacactgagaccctggagcatctgcaagagatcaacatcgccaccaggaccaccttcctcctgccaggccagaagcacttgtgtgtcaccagcctcctgatctgccagggtctgctctgggtgggcactgaccagggtgtcatcgtcctgctgcccgtgcctcggctggaaggcatccccaagatcacagggaaaggcatggtctcactcaatgggcactgtgggcctgtggccttcctggctgtggctaccagcatcctggcccctgacatcctgcggagtgaccaggaggaggctgaggggccccgggctgaggaggacaagccagacgggcaggcacacgagcccatgcccgacagccacgtgggccgagagctgacccgcaagaagggcatcctcttgcagtaccgcctgcgctccaccgcacacctcccgggcccgctgctctccatgcgggagccggcgcctgctgatggcgcagctttggagcacagcgaggaggacggctccatttacgagatggccgacgaccccgacgtctgggtgcgcagccggccctgcgcccgcgacgcccaccgcaaggagatttgctctgtggccatcatctccggcgggcagggctaccgcaactttggcagcgctctgggcagcagtgggaggcaggccccgtgtggggagacggacagcaccctcctcatctggcaggtgcccttgatgctatagcgcctcccctctcccctcagagggcacagctgcaggcctgaccaaggccacgcccggctctcgtgctctaggacctgcacgggacttgtggatgggcctggactctccagaaactacttgggccagagcaaaggaaaacctcttgttttaaaaaaatttttttcagagtgttttggggaggagttttagggcttggggagagggaggacacatctggaggaaatggccttctttttaaaagcaaaaaacacaaaacctcacaactgcctggcaagcccagtatcacttgtttgggccctagcgggactccaaggcagccacacgcccctcctggaagggtgtgtgcgtgtgagtgtgtgcgagtgtgtgggctggtgtgtgaatatctataaataagtatatatggtgtatattatatgtgtataaataaagtctgtacatattggagctctgggagatgctggaataaaagacaagagttacatctggaaaaaaaaaaaaaaaaaaa

SEQ ID NO: 28057 - DNA, 3351 bp, Homo Sapiens
gacattttggtctttgtccgcgggtcagtacggcccctgggtccacgtggcgcgaaagtaggaggaagacataggccaaggagccagacttcctgtgttaactccttcctctgccactttttaccttggggacctcagttaatatgatcctctgttgaagcaagaagacaaactgtatggtggagaaagaagtgggaaggatctgcgcggaagaagcctgagaagatgatgcacagatagagaggcaccaggacttgagaggcaccaggacttgggaggcatgttgatccatctccaggaaagactgagaaaaagagcgttgaatataagaaaaaatacttcctctgttctcagatcgtatttgttttaaggccacacctttttgaagttttcagtttgaaacacaacctggactgaaatcatgagggaggttgtgtaggaaagaatcatcaagggacttagttgggagcttctctaccacagcttactccttatggtattaaccccctttaagtgtaaatgtctttggtttaaaacgtttgtacctcatctgttaccagagtgttcatactggagagaaaccctatgaatttactgaatgtgggggaactgttactcatatgttgcatttcgtcgaacgtgcaagtcatgctgaagagaaaccctgtgcttctaaggagtattgacaagcccttagctagatgacaatctcattgagaagcagaaaattcatgctggagagaaactagtgaaggtagcaatacttcattgaatattagaaaatttttctagagagaaagcattgaatatactgagtatgataacatttcctctcaaaccttatcccttactctgcatttgggagatcatacacagagaagccttataaatgtaagagatgtggaaatatcttcagccaaaagtaaatcctcactcatcaagaaatttttactggagagaaaccttgtgaatgtgggaaagcttccattcagatgtcacacctcagccagcagaaaatttacagtggggaaaacccctttgcctgtaaggtatgtggaaaagtcttcagccacaaatcaaacctcactgagcatgagcattttcacacgagagagaaaccttttgaatgtaacgagtgtggaaaagcctttagccaaaagcagtatgtcattaaacatcagaacacccatactggcgagaagcttttcgaatgtaatgaatgtggaaaatcatttagccagaaggaaaacctccttacgcaccagaaaattcacactggagaaaaaccttttgagtgtaaagattgcgggaaagctttcattcagaagtcaaacctcatcagacaccagagaactcacacaggagagaagccctttgtatgtaaggagtgtggaaaaaccttcagtggcaaatccaaccttactgagcatgagaaaatccatattggagagaagccttttaaatgtagtgaatgtggaacagcctttggccagaagaagtacctcataaaacatcagaacattcacactggagagaaaccctatgaatgtaacgaatgtggaaaagccttctctcagcgaacatcacttattgtacatgtgaggattcattcaggtgataaaccttacgaatgcaatgtttgtggaaaagccttctctcagagctcatctctcactgtgcatgtgagaagccatacaggggagaagccctatggttgtaatgaatgtgggaaagctttctctcagttctcaacccttgctctgcatttgagaatacacacaggtaagaagccttatcagtgcagtgaatgtgggaaagctttcagccagaagtcacaccacattagacaccagaaaattcatactcactaaaaaccccatgaaagccttgaaagtgggaaagctttcattagaaatttgcacctcatcatgccccagaaataatccttctgaagcaaagcaccacgaatgaggttaactttaacaagtactaaaaacttaagggacaccagaaaatttgtactgaagagaaagacatgcatatgattaaaaccctgtgtccaacagagaaacctgcagcagagataatggtgaaagtttaggcacattttcactaaaagtgggaacagaaaatggaggcctgttttttattgctaccaccatagatctggagatcttcgccagtaacaagaaaaattaagttgtaaatattggaaaggaacagacaaaaatagatgacatggtcatctacaactaatattaagactcctgtggtattgattgagcagagcagaagagatttcaaaaaaagacctatgcatttattagaatttggaatatgatacaagtggcatcaggaaatgaggaaataatggaactattttttttaagtggaggtagtttgttctccaagggggaaaaatagaccatgaactatacacaaaagtgaatccagagattaaaaacagaaatatggaaaagctatgtactaaaatgcatatgaccttgggaatagggaaacattccttggaacaatttgagaaatacttagcggttctacttatgagtatgaatgctcaggaaatacgcactaggatatttactgtggcttgatttgtagtagccaaaaattagaaacaactgagaaagcccatcacgaacaatatgggaaattcttatgtaatactatatatctgtaaaatgcaacaaatgaaatccacatgtattaacagaaagatcccagaattgttgaggggggatcaagttgcagaatgatacagatagtacaatgacttttttgtaaatttgaattaaaagtttcctcataaaactcagtactatctattggtaatggatgcatatatgtatgtacatgtttttgaaacggattggaaggatacagaccaaactcttgatagtggtcacctgtgaagagtggagaagggaaaataatgagtgtgggaggtgggatgggtattggttaaaggggacttcagctttttatataaacatccacttctctttcaaaagacttcaagtaaatataagaagatactgattgattctggattgtggtatagggatatcttgtcttattttttgtacttttctgtatttttaaaatttctcaaaataggaatgggagtgaggatgggaatgctgtatctgtggaagtcatgttatactggattcatttccaattaaatactaaacattttatagaaaatatttctaaaattttatcacggatgaatggatggacttgctctctatgtaatatgaaattaatctattttattaaaatttaaaaggacagcaaaaaaaaaaaaaaaaaaaaaaaaaaaaaaaaaaa

SEQ ID NO: 28058 - DNA, 2282 bp, Homo Sapiens
gtgcttatagaggcccgtcctctgtggccgtgtgacctgcaagtattgggagagccacagctaaaccccgggacccctggaagcctagaaatgttatgagttctcattttgcccaagacctttggccagagaacatacaaaattctttccaaatagggatgctgagaagatatgaagaatgcagacatgacaatttacagttaaaaaaaggctgtaaaagcgtgggtgagcataaggtgcacaaaggaggttataatggacttaaccaatgtttgacaactacccagaaagaaatatttcaatgtgataaatatggaaaagtctttcataagttttcaaattcaaacacatataagacaagacatactggaataaatcttttcaaatgtataatatgtggcaaagcttttaaacggtcctcaacccttactacacataagaaaattcatactggagagaaaccttacagatgtgaagaatgtggcaaagcttttaaccaatctgcaaaccttactacacataagagaattcataccggagagaaaccctacagatgtgaagaatgtggcaaagcctttaagcagtcctcaaaccttactacacataagaaaattcatactggagagaaaccctacaaatgtgaagaatgtggcaaagccttcaaccgatccacagaccttactacacataagatagttcatactggagagaaaccctacaaatgtgaagaatgtggcaaagcctttaagcacccctcacacgttaccacacataagaaaattcatactagagggaaaccctacaactgtgaagaatgtggcaaatcctttaagcactgctctaaccttactatacataagagaattcatacaggagagaaaccctacaaatgtgaagaatgtggcaaagcctttcacctatcctcacaccttactacacataagatacttcatactggagagaaaccctacagatgtagagaatgtggcaaagcttttaaccattccacaacccttttttcacatgagaaaattcatactggagagaaaccctacaaatgtgatgaatgtggcaaaacctttacctggccctcaatcctctccaaacataaaagaactcatactggagagaaaccctacaaatgtgaagaatgtggcaaatcctttactgcatcctcaactctaactacacataagagaattcatactggagagaaaccttacaaatgtgaagaatgtggcaaagcttttaactggtcctcagaccttaataaacataagaaaattcatattgaacgaaaaccctacatagtgaagaatgtgacagatcttttaaatgttcctccacttttaattagcataagataattcatactggagagaaaccctatgaatgtgatgaatgtgggaaagcctttaaccagccctcgactcttagtaaatttgagagtttatatggaacacaaaccctacaaatataaagaatgtgacaaagctttttaaggaagttctcaacccttattacacataattcataccaaacagaagccctacaagtgtgaagaatgtggcaaaacctataaacctataacaagttctcaattcctttttttttgagatggagtttcactcttgtcaccgaggctggagtgcaatgacatgatctccgttcactgcaatctctgcctcctgggtttaagccattcttctgcctcagcctcccaagtagctgggattacaggtgcccaacaccacgcctggctaatttttggatttttagtagagatggggtttcacaatgttggccaggctggtctcgaactcctgacctcaggtgatccacctgccttggccttccaaagtgctggggttacaggcgtgagccaccatgcctggctacaagttcttaattcttaagagacaccatgcctggctacaagttcttaattcttaagagacatggcgataattcatgctgaagaggaaatctggaaacctgaaagatgcgacattgcttttaccaacacctccacatttcctatacataaaaataaattatactagtgtaataccctagaaatgtataaaatgtgacaaagcctttatatgattgtcatacatgattgtaggtgatagaagtcatactgccaaaactcctgtaagtgtgaagaatgtggcaaaatattttattagtgcttataccttatttcacaggaaagctcttatccttgagaaaaattgtgcaaatacaaagaatatggaaaaaccaaaaaaaaaaaaaaa

SEQ ID NO: 28059 - DNA, 2975 bp, Homo Sapiens
ggggcagagtcgtgcgtggttgagtttagataaaagccgagtgagcgcgctctgttccttaagattagtttaaggtgccttggattgctctgaagagctttgaccacctgatattgcttacatctggaacttcttggcttctcattccccagatgtgcgggtcagagagaccatggagaaaaactgcagctcttctgtcaggaggatgggaaggtcatttgctggcttgtgagcggtctcaggagcaccgtggtcaccacacgttcctcgtggaggaggttgcccaggagtaccaggagaagtttcaggagtctctaaagaagctgaagaacgaggagcaggaagctgagaagctaacagcttttatcagagagaagaagacatcctggaagaatcagatggagcctgagagatgcaggatccagacagagtttaatcagctgcgaaatatcctagacagagtggagcaacgggagctgaaaaagctggaacaggaagagaagaaggggctacgaattatagaagaggctgagaatgatctggtccaccagacccagtcgctgcgagagctcatctcggatctggagcgtcgatgtcaggggtcaacaatggagctgctgcaggatgtgagtgatgtcacagaaaggagtgagttctggaccctgaggaagccagaagctctccctacaaagctgagaagtatgttccgagccccagatctgaaaaggatgctgcgagtgtgtagagagctgacagatgtccaaagctactgggttgacgtgaccctgaatccacacacagctaatttaaatcttgtcctggctaaaaaccggagacaagtgaggtttgtgggagctaaagtatctggaccttcctgtctggaaaagcattatgactgtagtgtcctgggctcccagcacttctcctctggtaagcattactgggaggtagatgtggccaagaagactgcctggatcctaggggtatgcagcaattcactgggacctacattctctttcaaccattttgctcaaaatcacagtgcttactccaggtatcagcctcagagtggatactgggtgattgggttacagcataaccatgaatatagggcctatgaggattcttccccttccctgcttctctccatgacagtgccccctcgccgtgttggggttttcttagattatgaggctggtactgtctccttttataatgtcacaaaccatggcttccccatctacactttctctaaatattactttcccactactctttgtccatattttaatccttgcaactgtgtaattcctatgaccctgcgtcgtccaagctcttgaatattcttctgttcccacccacttctgataagtaccctgaggcttatcagcatgtgattctcccttctgatcttctgtttttctgtgttctcaattcttttgttgtttcttggtttttgaatcttttttgagatggaatctcgctctgtcgcccaggctggagtgcactggcgcaatctcggctcactgcaacctctgcctcctgggttcaagcgaacctcctgcctcagcatcccaagtagctgggattacaggcacccaccaccatgcccaactaatttttgtatttttatagagatagggtttcaccgtgttggccaggctgatctcgaactcctgaccgcaagtgatccacccgcctcggtctcccaaagtgctgggattacagatgtgagccgccgcgcccagacagttctttcgttttaaacagttactcagtactaggatgcacccagtggtgagagtaagcatctttgactgatgacaggtcttgaggtggatagggggcgctttcagtattttgccattaagcatagtatttgatgcaggttttttttgattgatgcaggggatcaaatttaggaagttctgatctgttaatttactacaagtttttgtataaaatgaaaactcgtattctacctatgtcttttctgtaaattattgagacaattgtgtatcatttttgttctgttaatgtggcttagtacattgatttacttcaatttgttaccacaacttgctgaaatacaccattattatttgttgtatgcaatactggatttattttgataacgtattgtttagattttgttctcatctatgttaatgaaagaaattggcctgtatttttacattcttgtaatatctttgccaggttctataaaatgcaataataagcaaataaattactttgtttttgtataagtatgtataggattgagctctaaaaccaaaccattataatgataatttgggtagcttcaaactcaaattgaagagagtcttcactacaatcttcactacaacctttggccttcctctctacatttaagagtagcaatagaacaataaaaaaaaatacgtctttcaaattaattgcagtaaaaacaaaagagtagtggggagagaaaaacaatccaatacatatttttctctcagaatagaaagaaaacacaaagagaaaatatgaacaatataaagcacttaaaggaagaggatgatttcttccagcttttccacactctctttatgcgcaggaacaaacagctgttgagtgagctgctatgactttggtagagaggtgcaatatgttttttgaaccagctataaaagaaattaagaggtacatgtgagggtagaaacaaatatcaaggatgagaatggcactggctgtcccatatggtatccaggagccaccaatgtctgttgagtacttcatacatgcctagtctgaattgagatgtgctcaatgtataaaatatataccagatttcaaatacctacttcaaaaaataatgtaaaatatctcactaataacttttcctttgtgtattgcaatgataatatgttggctctattggattaaataaagtatgttattcattttaaaaaaaaaaaaaaaaaaaaaaaaaa

SEQ ID NO: 28060 - DNA, 1829 bp, Homo Sapiens
gggggccgtcagggccccagggagcgcggggcgccgctgctgctgttcttcggctcggttctgtctaccgggcagcgccggggccggcggctgcggcggcagaggaacaggagccgggagccgcgttccgccgagagttgggcagaggagcgcccgcgccccggcggcgtcatgggccccctccccgcgcttcagagggcaccagccgcgggaacccccgggcctcctcgcgcccgagcctgagcgaccctcgggttctccggcgccccctccctcgccctattttttttcctactctcgctgccgttaccgcttctgctctccgttatggcaacagagccaccatcccccctccgggtcgaggcgccgggccccccagaaatgcggacctcaccggcgatcgagtccacccctgagggcaccccgcagccggcgggcggcagactccgcttcctcaacggctgcgtgcccctctcgcatcaggtggccgggcacatgtacgggaaggacaaagtgggtatactgcaacatccagatggcacagttttgaaacagttacaaccacctccaaggggcccaagagagctggaattctataatatggtttatgctgctgactgttttgatggtgttcttctagagctacgaaaatatttgccaaaatattatggcatctggtcacctcccactgcaccaaacgatttatacctaaaactggaagatgtgacccataaatttaataagccctgtataatggatgtaaagatagggcaaaaaagctatgatccttttgcctcatctgagaagattcagcaacaggtcagcaagtacccattaatggaagagattgggttcttggtgcttggcatgagggtttatcatgttcattccgatagctatgagacagaaaaccagcattacggaagaagcttaacaaaagaaactataaaggatggagtctccagattttttcataatgggtactgcttaagaaaagatgctgttgctgccagtattcagaagattgagaaaattctgcagtggtttgaaaaccagaagcagcttaatttttacgcaagttcattactctttgtttatgaaggttcatctcagccaaccactacaaaattgaatgacagaactttggcagaaaagtttttgtccaaaggacaactgtcagacacagaagtactagagtacaataataactttcatgtgttaagttccacagctaatggaaaaatagagtcttcagtgggcaaaagcttgtccaagatgtatgcgcgtcacaggaaaatatatacaaaaaagcatcacagtcagacttcattgaaagttgaaaatctggagcaagacaatgggtggaaaagcatgtcacaggaacatttaaatggaaatgtactttcccaactggaaaaagttttctaccatcttcccactggttgccaagagattgctgaagtagaagtgcgaatgatagattttgctcatgtgttccctagcaacacaatagatgagggatatgtttatgggctaaagcatttaatttctgtacttcgaagtattttagacaattgaatcctctgttgcagtctttttaaggggtgggccaatcataatgaagaggggcagtcaatatctgcacctttaatgctatgtaaaaaatttgtattatgagtcgacattttatttgtctttatacttttggaagaatggttaacttttttataatcttactcaggaaaactaactatttgttcattagaaaactatgaagaataaagaaacttaggaatggtaaaaaaaaaaaaaaaaaaaaaaaaaaaaaa

SEQ ID NO: 28061 - DNA, 1724 bp, Homo Sapiens
gggggtggggtgtttgtcgcagcggccgaggagggaagacggcagtttggcgacatttctcggccgaagggccatttgcttttgcggagatgcggcattccaaaagaactcactgtcctgattgggatagcagagaaagctggggacatgaaagctatcgtggaagtcacaagcggaagaggagatctcatagtagcacacaagagaacaggcattgtaaaccacatcaccagtttaaagaatctgattggtaaattaactcttgaactactagcattttagctctaatagttttaaatgatttgtcatttgcttatatagctttcatctgtcaaattgttttataattcagtcaacaaatattcgtttagaaaatatttgagtacttattttagataggcgctgaggctacagctgtaaataaaacaaagttcttatccttatgtatgtctgtctgcctgggagtggtaggagacagttgatcagtaagtgaatgtgaaatgtattaaataacatggtgagtcccaactgccagtaacgtgattagggagatgacacacaaaaagttaagtaatagtgatagaatgcccaatgagtacctttaacttgtatgtaggagggagatgggtatgttgtagtgctcattgtttcagaaataaggtagggttttataggggaggagttattccaacagagaaaagcagcatgtattattagtcacttataccatgtcgtacaggttatatttgtagatgaggccaagggatatgtttgggatttttagaagctggctttatttaagaactattcttttgcataggtagtagctagtaatttgggaaatggcctcaataaaaacttgcaacagcatgtgtgctgttttattgtattcttaccagtgtacaatttggaggtaatatatttatatagaattaaaggaatcttaaagttctaaatgattaaagaaaggctaggtaagttttcactctttcattaatttccctttttcgtttgttttgttggttctgttttctcgttttgtgcagatgttccattgggactctttaccagattgctttctaaattagccagctggggttactttaaaaaacagtatgtaatttctttccttctccacgttaacagacttgttctgccaaacagcttatttgtagtcagtgcagacaaatcatgcttcatacgcattgttatataaggggaagggggaaggtttatgacaggatttcagagaccagagataattaataattaatgtacagtacactaaaaaaaactatctgtaccccactattaataaatacaaaaaaccctaaggcttaacgtcatagtactggttactcataggataattatacgttgtatatatagaaaggaagtgatatgagtgatgaacagttcatttgtgctcatagttaactacgtaaacatgatactgagtccagttaaccaccaggccagtgcctgctttgatatttgtaccagatgtgtttggtggtcagcgtttaccatgatccagaatattctaatttttgaaggtcaaaaactttgagtgtttttataaaataacaaaaaactgaaaaatgcagaaaagtataaagatggtaatctctgtaggaaattagtccccattatttagctgtaaaattataattaaaaaaaaaatctttgtttccaaaaaaaaaaaaaaaaaaaaaaaaaaaaaa

SEQ ID NO: 28062 - DNA, 1101 bp, Homo Sapiens
ggggacacagcccgggtcgcaggcacctccccgccagctctcccgcttctcgcacagcttcccgacgcgtctgctgagccccatggcccacgccacgctctccgccgcccccagcaatccccggctcctgcgggtggcgctgctgctcctgctcctggtggccgccagccggcgcgcagcaggagcgtccgtggtcactgaactgcgctgccagtgcttgcagacactgcagggaattcacctcaagaacatccaaagtgtgaatgtaaggtcccccggaccccactgcgcccaaaccgaagtcatagccacactcaagaatgggaagaaagcttgtctcaaccccgcatcccccatggttcagaaaatcatcgaaaagatactgaacaaggggagcaccaactgacaggagagaagtaagaagcttatcagcgtatcattgacacttcctgcagggtggtccctgcccttaccagagctgaaaatgaaaaagagaacagcagctttctagggacagctggaaaggacttaatgtgtttgactatttcttacgagggttctacttatttatgtatttatttttgaaagcttgtattttaatattttacatgctgttatttaaagatgtgagtgtgtttcatcaaacatagctcagtcctgattatttaattggaatatgatgggttttaaatgtgtcattaaactaatatttagtgggagaccataatgtgtcagccaccttgataaatgacagggtggggaactggagggtggggggattgaaatgcaagcaattagtggatcactgttagggtaagggaatgtatgtacacatctattttttatactttttttttaaaaaaagaatgtcagttgttatttattcaaattatctcacattatgtgttcaacatttttatgctgaagtttcccttagacattttatgtcttgcttgtagggcataatgccttgtttaatgtccattctgcagcgtttctctttcccttggaaaagagaatttatcattactgttacatttgtacaaatgacatgataataaaagttttatcaaaaaaaaaaaaaaaaaaaaaaaaaaaaaa

SEQ ID NO: 28063 - DNA, 1654 bp, Homo Sapiens
ggggtttaaaatctagttaactactgcattataatttattatattctattcacagggcttcattatttcaaaaatgttgtgctagtgggatccctacaggatcgctatgttccttatcactctgcccgcattgaaatgtgtaaaacagctttaaaggacaaacagtcaggacagatctattcagaaatgatccacaacttgcttcgacccgttctgcaaagcaaggactgtaatttggttcgctataatgtcatcaatgcattgcccaatacagctgattcactcattgggagagctgcacatatagctgttcttgattcggaaatatttttagagaaattctttctggttgctgccctcaaatatttccaatagtataaaagcattgttagcgactggacaattacctcattcaacaatgtttcaaataatgtattatattaaaatgtagatgctgataagttctaagaaatatttatacctttttatatggaagataatttatatcatccatgtttagtgctttttaaacatcaactttactttctaggtaatgtggctgtgcaatatttttttaattttatctttttacttttctattactttttcatatattttgctacctaagtatttcagtgaaactttaagcccatacctgtgtctgattgtttattattggctttccacaattcttacatcagactacattatattagagaccattattgctagaatagcatgggatttaaaattttctaatactgggggtattatttagttaattataaatttttcttttcacattttactgtgttttaactggaaataaaattatggctgctacaatatattttttgaaatcaacttctgtagttctaaaatacaactttatcatacaatcaaaccaggtagttcatataaaacagtgtaatacaagttttctataaagtcattactgttgcttaaacatatttcatgcctattaaaatatattttctactggtgatttcaacattatttctcatactgacttttattactggaaatgttcctgtacatgttggcagcagataaagatttttgaatgtttgaatgccctctgccttgatttggttggaatttttgctaaattggtaatgttgcttgaactttatgactacattttcttttaacttttttcatggacttccttatatgtacataataattaaatgttgaaatttatgaaatacttttatgaatttagataatttttaaatattgttaaaatttattgaactaaaaagtaatgtaaataaaataattcatgttaaagatggaacaaaataattaactttacatgtttggtgatacagatgcaaatgtttttgatatatggagatgttgagtcttttgactttactaaaggtgctgaatagcattaaattcactattttccttttctgttttacttgtgaaaataaaaatgcactaaggttgggtagaagttctgtttgcactcactaattgtgacagacagaggtttttgtaagtatttattgtacaattgatgcatgtttatttttagcgttgttattgcctctggtgttaataaatgaacaaatggctatctggaggaacagctaaaaaaaaaaaaaaaaaaaaaaaaaaaaaa

SEQ ID NO: 28064 - DNA, 2657 bp, Homo Sapiens
caactacaacaacccactagggactggtgggcgtctggccattggctttgccgtgctgcttcgggcgctgtggaagggcacccaccatgccttccagccttccaagttgaaggccattgtggcgagtaaggccagccagttcacaggctatgcacagcatgatgcccaggagttcatggctttcctgctggatgggctgcacgaggacctgaatcgcattcagaacaagccctacacagagaccgtggattcagatgggcggcccgatgaggtggtagctgaggaagcatggcagcggcacaagatgaggaatgactctttcatcgtggacctatttcaggggcagtacaagtcgaagctggtgtgccctgtgtgtgccaaggtctccatcacttttgacccgtttctttatctgccggtgcccttgccacaaaagcaaaaggttctccctgtcttttattttgcccgagagccccacagcaagcccatcaagttcctggtgagcgtcagcaaggagaactccactgcgagcgaagtattggactccctctctcagagtgttcatgtgaagcctgagaacctgcgtttggcggaggtaattaagaatcgttttcatcgtgtgttcctaccctcccactcactggacactgtgtccccatctgatacgctcctctgctttgagctgctatcctcagagttggctaaggagcgggtagtggtgctagaggtgcaacagcgcccccaggtgcccagcgtccccatctccaagtgtgcagcctgccagcggaagcaacagtcggaggatgaaaagctgaagcgctgtacccggtgctaccgtgtgggctactgcaaccagctctgccagaaaacccactggcctgaccacaagggcctctgccgacctgagaacattggctaccccttcctggtcagtgtacctgcctcacgcctcacttatgcccgcctcgctcagttgctagagggctatgcccggtactctgtgagtgtattccagccaccctttcagccaggccgcatggccttggagtctcagagccctggctgcaccacactgctctccacaggttccctggaggctggggacagcgagagagaccccattcagccacctgagctccagctggtgacccctatggctgagggggacacagggcttccccgggtgtgggcagcccctgaccggggtcctgtgcccagcaccagtggaatttcttctgagatgctggccagtgggcccattgaggttggctccttgccagctggcgagagggtgtcccgacccgaagctgctgtgcctgggtaccagcatccaagtgaagctatgaatgcccacacaccccagttcttcatctataaaattgattcatccaaccgagagcagcggctagaggacaaaggagacaccccactggagctgggtgacgactgtagcctggctctcgtctggcggaacaatgagcgcttgcaggagtttgtgttggtagcctccaaggagctggaatgtgctgaggatccaggctctgccggtgaggctgcccgggccggccacttcaccctggaccagtgcctcaacctcttcacacggcctgaggtgctggcacccgaggaggcctggtactgcccacagtgcaaacagcaccgtgaggcctccaagcagctgttgctatggcgcctgccaaatgttctcatcgtgcagctcaagcgcttctcctttcgtagttttatctggcgtgacaagatcaatgacttggtggagttccctgttaggaacctggacctgagcaagttctgcattggtcagaaagaggagcagctgcccagctacgatctatatgctgtcatcaaccactatggaggcatgattggtggccactacactgcctgtgcacgcctgcccaatgatcgtagcagtcagcgcagtgacgtgggctggcgcttgtttgatgacagcacagtgacaacggtagacgagagccaggttgtgacgcgttatgcctatgtactcttctaccgccggcggaactctcctgtggagaggccccccagggcaggtcactctgagcaccacccagacctaggccctgcagctgaggctgctgccagccaggcttcccggatttggcaggagctggaggctgaggaggagccggtgcctgaggggtctgggcccctgggtccctgggggccccaagactgggtgggccccctaccacgtggccctaccacaccagatgagggctgcctccggtactttgtcctgggcaccgtggcggctttggtggccctcgtgctcaacgtgttctatcctctggtatcccagagtcgctggagatgagctcgcctgcaggcagctgctgtgagctggcctacctgcctgccccaggccatgcctgcctttgttgtggggaacacctctgggctttgggcctcagcttatgcatctggtgggagagggtggggaggttgtggcccctgcaggggcagagtatcctagggtgtgtatccatctggctgtctgtccattcatcctgctgctctgacccttggcctcaggcttggccctgcccaagctacttcctgtacttaaaagtgttaataaaaccagactattcaggcccaaaaaaaaaaaaaaaaaa

SEQ ID NO: 28065 - DNA, 2261 bp, Homo Sapiens
cgttccggtcggcgtctgggcatctcggcctcggcagaaagcgcgaccgccctgctgcgcggggcccgcggcgatgccgttcctgcacggcttccggaggatcatcttcgagtaccagccgctggtggatgcgattctgggctccctggggatccaggaccccgagcggcaggagtctctggaccggcccagttatgtcgccagcgaggagagccgaatccttgttctcactgagctgctggagaggaaagcccactctcccttttaccaggaaggcgtcagcaacgccctgctcaagatggctgagctggggctgacgcgggcggccgacgttctcttgcggcatggggccaatctcaactttgaagacccagtcacctactacacggccttgcacatcgccgtcctgcggaaccagccggacatggtggagctgctggtgcatcacggggccgacgttaatcggagggaccggatccacgagagtagccccttggacctggccagcgaggagcctgagcgcctgccctgcctgcagcgcctcctggaccttggagctgatgtcaatgccgctgacaagcatggaaaaactgctctgctccatgctctggccagcagcgacggggtgcagatccacaatactgagaacattcgtctcttactggaaggaggggcagacgtcaaggccaccaccaaagatggggacacagtgttcacctgcatcatcttcctgcttggtgagaccgtgggaggggacaaagaggaggcccagatgatcaaccgcttctgcttccaagtcacacggctgctgctggcacacggggccgaccccagcgagtgcccagcccacgagtccctcacccacatctgcctgaagagctttaaactgcacttccctctcctgcgcttcctcctggagtccggagctgcctacaactgctccctgcacggtgcgtcctgctggtctggctttcacatcatctttgagaggctctgttcccacccaggctgcacggaagacgagagccatgcggacctcctgcgcaaagctgagactgtcctggatctcatggtgaccaactctcagaaactccagctgcccgaaaacttcgatatccaccctgtgggcagcctggcggaaaagatccaggccctccacttctccttgaggcagctggagagctatcccccgcccctcaagcacctgtgccgtgtggccatccggctctaccttcagccgtggcctgtggatgtgaaggtcaaagccctgcctctgcccgacaggctgaagtggtacctccttagcgagcacagtggctccgtggaagatgacatctgataggtctcaggctacaggaacgggggacacgggcagctcaggtcagcctgttggtagatgctgggacagcattagaagagggtctttttgatctgggagatgagacgggatccttcatgagaaaagccagccaggtagagcctgaagctgtgatcactccagtggtgaagggtgcagctctggttcttccagagagactgcccccttccctccagtggcactccaagtcccccccatgttggaaagaggaacagggcttggattgatgtttataccctctgaattggagggcagtgccagggcatttgcagaagctgggaaggaccaagcctcagcaccccagggctgcggggctcttgttggccgcacgtggcagtgcagctggagaggaagcctggggcacgtcctgtgcggtgccaccaaggccccacccctgccccttttccttccaggttctgttactcacagaagtgtttctggtgggctctgcgggagaagacactaagggccccacaggcttgtttcatggtgttgcaagccaagctggcccctgcctgttcctgtagctctggggccaggtcagccgtggccccacctaccagaactgtgctctgctggcagctgtgcttttgccaaacccagggcctcagcgaccatgacttctgctaaaaagcaatcatgagtgcgtggctggggacagacctctctgaagtgtctcctgttgtgaggggctcactttggagccactgaagagccgactgtgccacccacttgcgagcctcagtcccttccaagctgcactggtcattgggaattgtgtaaacacctctggggataagctgaggtgactaaatgatatatttatattgtaagattaaactgactttcttggccttaaaaaaaaaaaaaaaaaaaaaaaaaa

SEQ ID NO: 28066 - DNA, 3314 bp, Homo Sapiens
caaagaagttttcaaattttgttggcccccatttgaccaaaaaagtgacactgaattccgaaaacattgctgtgaatggataaaaaggatttctggtgaatgtggaagtagctttcctcaagttgttggttcactatttctttctcctggtggtcctaagtttattcatctgatgtatcattttgcaagatttgttgcaatgaaatatattaaatccaattctaaaaattcttctcatcattttgtagagacatttaacataaaaccacaggacttgcacaaatgcattgccagatgccatttcgcacgtagcagatttttacaaattttgcaaagacaagattgtgttacccaaaaatatcaggaaaatgcacaattatcagttaagcaggtacgaaacttgagatctgaatgtataggattggaaaaccaaataaagaaaatggaaccctatgatgaccacagtaatatggaagaaaaaattcaaaaggttcggtctttgtgggcttcagtgaatgaaacgctcatgtttttggaaaaagagagagaagttgttagttcggtccttagtcttgttaaccaatatgctttagatggaactaatgttgctattaatattccaaggctcttacttgacaaaattgagaaacaaatgtttcagttgcacataggaaatgtttatgaggctggaaaactgaacctcttaacagttattcagttattaaatgaagtcttgaaggtgatgaaatatgaacgttgtcaggctgatcaagcaagattgacggtagaccttcactaccttgaaaaagagaccaaatttcagaaggaaagattatcagatctgaaacatatgaggtatagaataaaagatgatctcacaactataagacattctgttgttgaaaagcaaggagaatggcataaaaagtggaaagaatttcttggtttgtctcctttcagtctaattaaaggttggactccatctgtagatcttttaccaccaatgtctcccctttcgtttgatcctgcctcagaagaagtgtatgcaaagagtattctttgtcagtatcctgcttcacttccagatgcacataagcaacataaccaagaaaatggttgcagaggagacagtgataccttgggagcgctacatgatctagccaacagccctgcctctttcttgtcgcagtcagtttcatcatcagatagaaacagtgttacagtacttgaaaaggacacaaagatgggaactcccaaagaaaaaaatgaagcaatttctaagaaaataccagaatttgaagtggaaaattctccattatcagatgttgcaaagaatacagagagtagtgcatttggagggtctttgccagctaaaaaaagtgatccatttcaaaaagagcaagatcatctggtagaagaggttgccagagcagttttatctgattcaccacagctctctgaaggaaaagaaataaaattagaggaactaattgactctctgggttctaaccccttcttaacaaggaatcagattccccgtactccagaaaacttgataactgaaattaggagctcatggagaaaagctattgaaatggaagaaaacagaactaaagaaccaattcaaatggatgctgaacatagagaagtattgccagaatcattacctgtgttgcacaatcaaagagaatttagcatggctgattttctcttagaaaccactgtatcagattttggccagtctcatttgactgaagagaaagttatttcagattgcgagtgtgtgcctcagaaacatgtgctgaccagtcacatagatgaaccaccaacacaaaatcagtcagatttgttaaataagaaagtaatttgcaagcaagatttggaatgtttagccttcaccaagctttcagaaactagccgaatggagacattctcccctgctgtcggcaataggatagatgtgatgggtggcagtgaagaggagtttatgaaaatattggaccacttagaagtttcttgtaacaaaccttccacaaataaaactatgttgtggaattcttttcagatatcaagtggaattagttctaagagttttaaagataatgattttggcatattacacgaaactctcccggaagaagttggtcatctaagttttaatagttccagtagttcagaggccaattttaaactggagccaaatagtcctatgcatggtggcactcttctagaagatgttgtgggagggagacagactactccagaatcagactttaatttacaggctcttcgcagtagatacgaggctctgaagaaatctctttccaagaaaagggaagaatcttacctctcgaattcccaaacacccgaaagacacaaaccagaattgagccctactccccaaaatgtacaaacagatgatacgcttaactttttggacacctgtgatttgcatactgagcatataaagccatctttacgcacgtccatcggtgaaagaaaacggtctctttcaccactaattaagttttctccagtggaacaaagattgagaaccacaatagcatgtagtcttggagaactacctaatttaaaggaagaagacattttgaataagagccttgatgcaaaagaaccaccgtctgacttgacaagatgaagacgtacccatttaatataactatgatgcacttaaattgaagctatgccacaggatagaaaatgaattacaacttaaatacatgttggaagtgtaacactgtttttcaaggtttaaaaaaattcctaatgccttttagccttctttaatatttttaggtaaggaaagtatgtttggattttttcctctttgtaggtatatgagattgaaatgtgaagtatttggacaacaaacgtcaagcaatgggaagccattttgatttcttgagtaatcttgtaagcattaagtgaatgacaaagtagtagtgtaacttatttcttatgttataacttcagtcaattaatataaggatagtttttgttgtatgttcactaaatggttaatataatagccattgaatatactaatctttcatcttagagaactatacaacttttattgtttcttaatggaacattctggctaaccagaaaaagtgagaaaagtagtaccttgggatgtgtagtcaagatgacaaattttaagactggaaaagctctaaacaggcttaatgattcttcaggtagaatgatcctgagaagtgatgtttgatggaataaagtgcatgtgatgattaagtgaagactggggcagaatgatttaaaaaaaaaaaaaa

SEQ ID NO: 28067 - DNA, 2801 bp, Homo Sapiens
gggctcgggtgcgggcgcggctggggctgcggcttcagggtgcctctgacagctgctgcaggaaacatggccaagtttgccctgaatcagaacctgcccgacctgggcggcccccgcctgtgcccggtccccgccgccgggggcgcacgcagcccgagctcgccctactcggtggagacgccctacggcttccacctggacctggacttcctcaagtacatagaggagctggagcgtggccccgctgcccgccgcgccccgggacccccgacctcgcgccgtccccgcgcgccccggcccggcctcgcgggcgcacgtagcccaggcgcctggacatccagcgagtccctggccagtgacgacggtggagcaccgggcatactctcccagggcgcgccctcggggctcctgatgcagccgctgtcgccgcgcgcgcccgtgcgcaacccgcgcgtcgagcacacgctccgggagaccagccggcggctggagctggcgcagacacacgagcgcgcgcccagccccggccgcggggtcccgcgcagcccacgcgggtccggccgcagcagccccgcccctaaccttgcccctgcttcgcccggccctgcccaactgcagctggtgcgcgagcagatggccgcggcgctgcggcgcctgcgcgagctcgaggaccaggcgcgaacgctgcccgagctgcaggagcaggtgcgcgcgctgcgcgccgagaaggcgcggctgctggccgggcgcgcgcagcccgagccggacggggaggctgagacgcgcccggacaagctcgcccagctgcggcggctcaccgagcgcctggccacctccgagcgcggcggccgtgccagggccagcccccgggctgacagcccagacggcctggctgcagggcgcagcgagggcgcgctccaggtcctcgacggggaggtcgggagtctcgatgggacgccccagacccgggaggtggccgccgaggccgtgcccgagacccgagaagcgggtgcccaggccgtgccggagacccgggaggccggcgtggaggctgcccccgagaccgtggaggcggacgcgtgggtgaccgaggcgctgctggggctgcctgcggccgccgagcgcgagctagagctgctgcgcgccagtctggagcaccagcgcggggtgagtgagcttctgcggggccggttgcgggagctggaggaagcccgcgaggctgcggaggaggcagcggcgggggcccgggcccagctacgcgaggccaccacccagaccccgtggagctgtgccgaaaaggccgcgcagaccgagtccccggcagaggcgccctccttgactcaggagagctcgcccggatccatggacggagacagggccgtggcgcccgcgggcatcctcaaatccatcatgaagaagagagacggcacacctggtgcccaacccagctccggacccaagagcctgcagtttgttggggtcctcaacggagagtacgagagctcctccagcgaggacgccagcgacagcgatggcgacagcgagaacggtggcgccgagcccccgggtagctcctcgggctccggggatgacagcggcgggggatccgactcgggcacccctggccctcccagcggcggggacatccgggaccctgagcccgaggcggaggcagagcctcagcaggtggcacaggggaggtgcgagctgagcccgcgtctgagggaggcgtgcgtagcgctgcagcggcagctgagccggccccgcggagtagccagcgacggcggcgcagtgcgcctcgtggcccaggagtggtttcgagtgtccagccagcggcgctctcaggcggagcccgtggccaggatgctggaaggggtgaggcgcctgggacccgaactgctggcgcacgtggtgaacctggcggatggcaacgggaacacggccctgcactacagtgtgtcccacgggaacctggccatcgcaagcctgctcctggatacgggggcctgcgaggtcaaccgccagaaccgagccggctactcggccctcatgctggctgcactcacctctgtgaggcaggaagaggaggacatggctgtggtccagagactcttctgcatgggtgatgtcaatgccaaggccagtcagacggggcagacagccctcatgctggccatcagccatggccgacaggacatggtggcaaccctactggcgtgtggggctgatgtgaatgcgcaggatgcggatggggccacagcgctgatgtgtgccagtgagtatgggcgcctggacaccgtgcggctgctgctcacccagccaggctgtgaccctgccatcctggacaatgagggcaccagtgccctggccatcgccctggaggctgagcaggatgaggtggccgctctgctacatgcccacctgagctcgggccagcccgacacccagagcgagtcaccccctggctcccagacagccacacctggtgaaggagaatgcggtgacaatggagagaacccccaggttcagtaagctgcctcgtctggctcactacacctagctgtggggagatctcctcgtcagtcacctcagcctttggcgcacagaagggtccagggtcccctgctcagaggctaacactggccgaagagaaaggcaatttcagttggggtgactgtggcaggaaggggctcactctggccccaccaaggtgaggtggggaccaagtgatagagccctgatccacccactctctgaaacttctttgctaataaaacattcctactaaaaaaaaaaaaaaa

SEQ ID NO: 28068 - DNA, 816 bp, Homo Sapiens
aaagtaaacaacaccccaagtgtccgggaacaaaggcaggttgtctttctacggtgccgcagccgtgtgcctcttctgaagaataagagctattattattctttatgtcttatcctttttttttttttaaaaaaaaccaagtttccttctaagggaaataaacaccaaaggtaggattccaaggaaatgactcacagcggctggcagggctctggcggggctggcccgggcccccgcgctccagcccgcagcagatgtcggcccggccttccctccctcccttgccggccaaacccgctggaagcccgcggttgcgggagcgccctgcgcccgtgggacctggcggcgaggacgcctattccctgcttctgcgaccacagctgggcactcggaaagttgctagggccgaagaggcgggaggggaggaagggaagagagaggcggaggcgtggaccaggcgggcagcagcctcagcccgccgaggagtgatcctccgactgtgaaaaaccagacctctggctgcctggctccctaggaatcaagaagacgcacagactgaaaatcaagggaggaaggaacaagatcaaggatgaggattagcatctgcaaattgaactctatctaatttgcatgtttatttcttagaattgtaattaaatttgtgtaataaatgttttccatttcatttgtacacttaaaacttgggtgactgacatgcagttaagtgaatttcctttttttaaaagcaaatgtagattattcaataaagcagcaaaccaatattaaacataattagaaccaaaaaaaaaaaaaaaa

SEQ ID NO: 28069 - DNA, 9699 bp, Homo Sapiens
cagcggcctggtgcccgatgataccggcatgttccagtgcttcgcccgcaatgcagccggcgaggtgcaaacttccacctacctggctgtcaccagcatcgcccctaacatcaccagaggccccctggacagcacggtgatcgatggcatgtcagtggtgctagcatgtgagacctcgggggcgccccgaccagctatcacttggcagaaaggggagcgcatcttggccagtggctctgtgcagctgcctcgcttcacacccctggagtcgggcagcctcctcatcagccccacacacatctccgatgcggggacctacacctgcctggccaccaactctcggggggtcgatgaggcctcagcagacctagtcgtttgggctcggacccgcatcaccaagcccccccaggatcagagtgtcatcaagggcacccaggcctccatggtgtgcggagtgacccacgacccccgagtaaccatcaggtacatctgggagaaggacggggccaccctgggcacggagagccatcctcgtatccgcctggacagaaacggctccctgcacatctcacagacgtggtcgggagacatcggcacgtacacctgccgggtgatctcagcaggaggcaacgactctcgcagtgcccacctgcgagtcaggcaactgccccacgcgcccgagcacccagtggccactctcagcaccgtggaaaggcgagccatcaacctgacgtggaccaagccctttgatggcaacagccccctgatccgctacattctggagatgtcggagaacaatgccccctggactgtactcctggccagtgtggaccccaaagctacctcagtgacagtcaagggcctggttcctgcacgctcctaccagttccgtctttgtgccgtcaacgacgtggggaaaggacagttcagcaaagacaccgagagggtctccctccccgaggagccccccacggcccctccacagaacgtcatcgccagcggtcgaaccaaccagtccatcatgatccagtggcagccgcctcctgagagccaccagaatggaattctcaagggttacatcatcaggtactgcctggccgggctgcccgtggggtaccagtttaagaacatcacggatgctgatgtgaacaacctgctgctggaggatctcatcatttggaccaactacgagatcgaggtggctgcttacaacagcgctgggctgggggtctacagcagtaaagtcaccgagtggacgctgcagggagttcccacagtccctccgggcaatgtgcacgcggaagccaccaattccacgaccatccgcttcacctggaacgcccccagcccccagttcatcaacggcatcaaccagggctacaagctgatcgcctgggagccggaacaggaagaggaggttaccatggtgaccgcccggcctaactttcaagacagcatccacgtgggcttcgtgtctggcctgaagaagttcaccgagtacttcacctcagtgctgtgtttcaccacccccggggacgggccacgcagcaccccgcagctggtgcgcacccatgaggatgtgcctgggcccgtgggacacctgagcttcagtgagatcctggacacatcgctgaaggtcagctggcaagagccgggagagaaaaatggcatcctcacagggtaccggatctcctgggaggagtacaatcgaaccaacacccgtgtgacccactacctgcccaacgtgaccctggagtaccgtgtcacgggcctcaccgcgctcaccacctacaccatcgaggtggccgccatgacctcaaagggccagggccaagtgtccgcctccaccatctcctctggggtgcccccagaactcccagggccccccaccaacctgggcatttccaacatcggcccccgctctgtgaccttgcagttcaggccaggctacgatgggaaaacctccatctcccgctggctggtggaagcccaggtaggcgtggttggggagggagaggagtggttgctgatccaccagctctccaatgagcccgatgcccgctccatggaggtgcccgacctcaaccccttcacctgctacagcttccgcatgcgccaggtgaacatcgtgggcaccagcccccccagtcagccttctagaaagatccagaccctgcaggcaccccctgacatggccccagccaatgtgtctctgcgcacagccagtgagaccagcctgtggctgcgctggatgcctctcccggagatggaatacaatgggaaccctgagtccgtgggctataagatcaagtacagccggtcagacgggcatggcaagacgctgagccacgtggtgcaggaccgtgtggagcgggactacaccatcgaggacctggaggagtggacagagtaccgcgtccaggtccaggccttcaacgccatcgggagcgggccctggagccagacggtggtgggcaggacccgggagtcagttccctcttccggccccaccaatgtgtctgcactggccaccacctccagcagcatgctggtgcgctggagcgaggtccccgaggctgatcgcaacgggctcgtgctgggctataaggtgatgtataaggagaaggactcggacacccagccccgattctggctggtggaaggcaactcatctcgcagtgcccagctcaccggcttgggcaaatacgtgctctatgaagtccaggtgctggccttcacacgcatcggggacggcagccccagccaccctcccatcctggagcggacgctggatgatgtcccaggaccacccatgggcatcctgttcccagaggtgcggaccacgtctgtgcggctgatctggcagccccctgccgcccccaatggcatcattcttgcttaccagatcacacaccggctcaacaccaccacggccaacaccgccactgtggaggtgctggcacccagcgcccggcagtacacagccacgggcctcaagccagagtctgtctacctgttccgcatcacggcccagacccgcaagggctggggagaagctgccgaggccttggtggtgaccaccgagaagagagaccgtccgcagccccccagcaggccaatggtgcagcaggaggatgtgagagcacgcagcgtgctgctgtcctgggagccagggagcgacgggctctcccctgtgcgctactacaccatccagacccgcgagctgcccagcggcaggtgggcactgcactcggcctctgtgagccacaatgcctccagcttcattgtggacaggctgaagcccttcacgtcctacaagttccgagtgaaggcgaccaatgacattggcgacagcgagttcagcgaggagtcggagtcactgaccaccctgcaggctgcccccgatgaagcacccaccatcctctccgtgacgccccacaccaccacctccgtgctaatccgatggcagccgccagcagaggacaagatcaatggcatcctcctgggcttccggatccgataccgggagctgctctatgaaggactgaggggcttcatgcttcgaggcatcaacaacccaggggccacatgggctgagcttacctccatgtactccatgcggaacctgagccggcccagcctcacgcagtacgagctggacaacctgaacaagcacaggcggtacgagatacggatgagcgtgtacaacgctgtgggtgaggggccctccagccccccgcaggaggtctttgttggggaggcagtgcccacagcagcacctcgtaacgtggtcgtccacggcgccacggccacacagctggacgtgacttgggagccacctccgctggacagccagaatggagacatccaggggtacaagatttatttctgggaagcccagcgggggaacctcacagagcgagtgaagacgcttttcctggctgagaacagcgtgaagctcaagaacttgactggctacacggcctacatggtcagcgtggccgccttcaacgccgctggggatgggcctcggagtacccccacccaaggccagacccagcaagcagcccccagcgctcccagctcggtcaagttcagtgagctgaccacaacctcagtgaatgtgtcctgggaagccccgcagttccccaatggcatcctggagggctacaggctggtgtacgagccctgcagccccgtggatggagtcagcaagatcgtgaccgtggacgtgaaggggaacagccccctgtggctgaaggtgaaggacctggcggagggggtgacctacaggttccgcatcagagccaagaccttcacctacgggccggagatcgaagccaacgtcaccacgggccccggagaaggtgccccaggaccgcctggcgtgcccatcatcgtgcggtacagctctgccatcgccattcactggtccagcggagacccgggcaaagggcccatcacccgctacgtcatcgaggccagaccttcagacgagggactatgggacatcctcatcaaagacatccccaaggaggtgagctcctacacgttcagcatggacatcctgaagccgggcgtgagctatgacttccgggtcatcgcggtcaacgactatggtttcggcacccccagcagcccctcccagtctgtgccagcccagaaagccaaccccttctatgaggagtggtggttcttggtggtcattgccctggtcggcctcatcttcatcctgcttctggtcttcgtgctcatcatccggggccagagcaagaagtacgccaagaagacagactcggggaacagtgccaagtctggagccctaggccacagcgagatgatgagcttggatgaaagcagcttccctgccctggaactcaacaacaggcggctctccgtcaagaactctttctgccgaaagaacggcctgtacaccaggtctccccccaggcccagcccaggcagcctgcactactcggatgaggatgtcaccaaatacaacgacctcatccctgcagagagcagcagcctgacggagaagccctcagaaatctccgactctcagggaagtgacagcgagtacgaggtcgactcaaaccaccagaaggcccactcctttgtcaaccactacatcagtgaccccacatactacaactcgtggcggcgacagcagaagggcatctcgagggcacaggcctacagctacacggagagcgactcgggtgagccagaccacaccaccgtcaccaacagcaccagcacccagcagggcagcctctttcggcccaaggccagtcggactccaacgccccagaacccccctaaccccccaagtcagcagagcaccctctaccgtccccccagcagcctggccccaggctcccgggctcccatagcaggattttcatcatttgtttgacatcagaagaggaaaaagcagaaagagaaatggcaccaaactcctccttcacccctcctctcactgcctgccagaaaacaaaaacaccaagaaaccaagtcaacttttcacctcctgagtttatttttccagagattccagggccagcaaagccggcgttcagaaggagggagaaaaccgtgagaggatgtgtgtggccagcagctcttcagctttgagatggtggggttcactgctcccttgggaattacatggagctggggaagtggctgtgtcactgctatggacacggagtggggcgggcatctggagagagagagggagcggaggctaaggactggaggccgccaggcaggcgtggccgagggaagaaaaagcttctggatgtccagccagctgcccccttccagcccctccaggacccctggacccactgccgctgctctctgcaaaaagaatgggcatcccggaagccacgcctatcttctctctctgctcctccttccctccatgcaccatcactgtggctggcaggcatcggacagcctcatccagaccccctgccctgtcttggcaacctctactgcccatctcccctgctcaacttctccaccaagcatttggtttatttagaaaaaggaagaaaaacaaaaaacaaaaaactaaagggtgagaatttgcttagcgccttccttgttcctgcatattttttaaaatattgaatccaaggaagagagcccaagggtaggggagaaaccccccacaactgacccctgcctccctgtgctggaattgactttcctgagcatggacaaggaaaggtgaagtctggggagcagaggtgtaaataaggcgactggccttggcactgtgggatgattaggtttaacgcattgtgggcaagataagaatgacactttgactgttctctttcttccaatccaggttccatccgtcctctctttaaaggggtagtcagcttcccaaggctggggagtggggcacagctgagggatctccctctgggcagacacgtcactctccactggatagatcctcaccacacacacacacacacacacacatctcccatgcacttacaaggaacagggtctagggatcctctccagaacaaactcatctgggccctcctagccagacagcacactcactttcagatctgtgtccctctcgctgccacccggcagcctcctaagcacagaggcacaggagcccagaggggtggcccaagtccctggtccagaggctggaatacccagagtttgctcagtcagcctagcacccagtttacaggcaaaaaggcaaagacaccctaacccccagtaacagcttccaggctgggctccgcctggccagggcggggaggggaaggggcaggtcaggaagctcagtccaaagtggacccagcatttgaattgcacgcccagcaggggcaggtcagatgggaccaagtgacaagaatagctgatgggagggaatgcttttacacacacacacacacacacacacacacatacacatacacaatctgctccaaggagtgttctgcaaaaagccacatccagtggccaggatcttcccgtccacttggtacttacggatgccagggtttagggagaagcctttctatctaactccatacattgtccaaggccctctgtgccctcagccagccctgtaaggccagcccaacacctgccccaccgctgagatgggtggcagatggcccacaggggcctgtctgattcagcgtgagccccttcgtggagcagggctccctctgtgcactgtgtacaggcgctgctggccctgcccaagagatgatgctctgttggggtgggtgagcagagttcaaggaagcccaagtaggagatttgggaaacatgccaaggtaagagagagcctggaccactctcctacagccccaagtcagtcactgtgctaatggtgaccgggaagggaagtcagggtctggggcccaaagaacgggcacacccagccatgagtttttcctgaagcacttgacccctgggaaatgtgaacggggagatgctggaagatggctcagcagacaggccagcccagctccagtgtccaaaaagcggtttctccaataaggaggcctgggaagggaagcacaatcttccccaaaggagaaccaagggctgaggttctgcccctccaggaagtaaggtgctctcggggcctccttggacttgtctgggggctgcagtggagtcagctggacacctgctccacccctgccacctccgcccccaccctctgcagcatctggcatctccatggcagcacatctgcagctgccggcctgtgatcgtgccgcacagctttcttttctttcctctcatctttttttttttttttttttttaaataacttcatccctttccctctctgctgagcatttaaccatttaaggaagttcccagtttgcattagggaattatttaagcccagcccagtgacggattatttgggaggaagcaggagtgagtaaaaacattgtgtctgtgtatatattgcacatgaggtcaattttcctttgcctttaatgaatcacctggtgcactaagatattccacccccccactccccacacgctcattcgcacccatgctgacacctacgtgtacatgcgggatggtgcccatgcacgcctgtgcttacacacatgcacacacaaatatgcacagaacacacatctgtatgtgtgttagcaaagagactcctgaactccctctgatggctgaagccatctctcccctgtgaggcacaggtggcctgggttgcttgcacttggggcgtggctgggatctattgtctgagagggtgaggacaccacgcaaatttagacaagcccatgagatcaggctgggcccatggtgaaagtcccacacttagtcaatacccactcatctggaatattgtctccacagccccagccacagctggaagcccaggcctgcagctgtggaactctagattttttcaggacacgtctctttgcccttgtttacatatctactggcacagccgaggctcccaaccgtcctcccagacacctggccacattagaaaggggtggtgggccctgccctttgtagaaagagtgggaccctttctggcctgtgattttccatgccagtgatgccagggcccctgcctgtgggactccacccaaagcaggttcacaccaggacacacctggcacctttggcattgcctccctgtgccctaagcaatctcccagtgttgcacccaggagcccatgctgggcacaccagggctttccccttcctggctgcgcctccagagttgacgtcagctccacacccacactgccaagacaaaccaaaaagatgctctgggctccagaaccaccatcctcctagggctccagagagtttgcaaacccaggctgcctccccttctgtccatccctcaccccccggcccccaaaactcctacccccaaacctggcactgccgtgatttagaggaaacaaggacacagcgggggctgcccccacctggtgcacgctgcctcaaggccttctgttgctgcccacgcctccctgggcagtgcttctaaaggtgccagagcctcaccacagtgccactctggctgggcaggggcttccctcagcttcccagagtgcacatctgaaggtgcctaccctgggtgaggggctggtgggcaggaaggtaaaggggagaccatctgagcagccgccacccgctccccagtgcctctgtatggccctatccagggacacccatgggcatgcgcacatggcaatcctgaccaccacctgagcacaggtgccccctcgggaccaccccccttctctttgtttccatcagaataaccaaaagcatttaaacgtgttacctttctccatccatctagactccagaaacaaaaatcaacacaaatctttattttttgatttaaaagatataacaaaaaattatggggagagtattcattatggcaggtgtctgtctgtaagaaaaaaatatatatctctatgtcatatagcgtgttagcaggtttattttttaaatgaaaggtaagaaagaaattgatttgaaatatataccacaagaagtcccgtgtcctgtcaaactgtcagtattttataaataaacttttttttttggaaaaaaaaaaaaaaaaaaaaaaaaaaaaaaaaaaaaaaaaaaaaaaaaaaaaaaaaaaaaaaaaaaaaaaaaaaa

SEQ ID NO: 28070 - DNA, 2500 bp, Homo Sapiens
ggggagagaggtcggaggtaagtggctatagaagtcgggcggacccggaacccagaggacgcgacaccatgacttatgcttatctcttcaagtatatcatcatcggagacacaggtgtggggaagtcatgtctcctcctgcagtttacagataagcggttccagcctgtccacgacctcacaataggtgtggagtttggagctcgtatggtcaacattgatggaaaacaaatcaaactgcaaatctgggatacggggagcagctggagcactgctggtgtacgacattacaaggcgtgaaaccttcaaccacctgacctcatggttagaggatgcccggcagcactctagttccaacatggttatcatgctcattgggaataagagtgacctagagtcccgcagggatgtgaagagagaagaaggagaggcctttgctagggagcatggacttatattcatggaaacttcagccaaaacagcctgcaatgttgaagaggccttcattaacacagccaaagaaatatataggaagatccagcagggtttatttgatgtccacaatgaggcaaatggcatcaagattgggccccaacagtcaatttcaacatcagtgggacccagtgcctcccagcggaactctcgtgacatagggtccaactctggctgctgctgaacatctggcttgaactttttttgtccttcctggaatagcttcagatcaataggcttaatgaaagaggtctttcttgctttggctgagagcagcctctttttaaagtgtgatgttttgcctttccacctaaagaccaggagagaatttgggcccttactgacctgtcctccttcagggacatgagcattccctatagattagggttcttcttatcctcctatacaaatttcttaaattgttaggatcaaagttgattatcacagtagttaaaaaataatttcatggcggggcgccatggctcatgcctgtaatcctagcactttgggaggccaaggtgggcagatcacctgaggtcaagagttcgagaccacacctggctcatttttgtatttttagtagagacagggtttcaccatgttggccaggatggtcttgatctcttgacctcgtgatccgcccaccttggcctcccaaagtgctggattacaggtgtgagccaccgtgcctggcctaaataaataatttcgtaagcatatacaatccacttcccactaagaattagggtcaaagacattctatttgaacacttgcaattacctagatctagttggcctttggttgatagatcctctgcctcggaatttcattgagtttttttcttccttgcctttgggtgtctgcttgccacttcctaagaattcttgtagaaggcagtttcctctacttgcccaagagcactgagtacttctctactatcctattattagcttctatctcttagtgtaacttcaaaacttttaagagcagtgaagttggtcagggacatgtggccacttattattacctaaagaaaacatttgttccctgttcattttattttaggggccagatctaacattgtagtgtctttcaccagatagacttctactgtttcatcaaactcccttcttaactagacctagactttctactccaatcaggctaatctacttactgaatgtgacatatttattcctagttccatacctttgcacatgccctactctccactaattatacttaaaagtccaaaaattttttctttagtaacagacttaggtactgctaagcagttattaacacaatattccttagttttcatatgttggttattcatatgtctatttatatgtatatttatttttatgtatgttactatgtaaatatggtttgcagttgtttttgtgtggaatcttgtctttccgtataagttgtaagctccttgagagcaggatccatgtcattcctttatttttataaattattccccctatcattcctttacagtgcctagtgctactcattatgtgttcattgaatttgactgacatagttaaaaacttaaggtttattttagactttcaaggaaacaaaagactttagagtcctctctctgtaattctgccccactcatttgtttaccctgggttttatacagttctcttccttctcccctcccacctttccctggctttttgcctccattccatgaggcatacagtaaggctgcctgctagtaagcagtcacataagtgggtacctatccagccattctcttttcagagcatataatactatcttagccaaacttgcctttgcttcactcatcatgcagccttctgggttggttgctatatatatcttttttccttgatgtcccattctcttccacagccctgaggtcttacgaatttttctactttctttttgctgttgatgaattgtttcattattaaatatatgcatgtatcaaagctaaaaaaaaaaaaaaaaaaaaaaaaaaaaa

SEQ ID NO: 28071 - DNA, 2924 bp, Homo Sapiens
cagttctctgccttccgtctttccctctgtcctcatccttagcccctctgccctgctttgtgtcccacctctccccctccacttcctctcctcccaccctcagtctcacccccgggctgtctcactctctggagcctctccttcctgttctctgtccccagtgctccctaccctcacctcaagacgaccatggccaccatcccagactggaagctacagctgctagcccggcgccggcaggaggaggcgtccgttcgaggccgagagaaagcagaacgggagcgcctgtcccagatgccagcctggaaacgagggctcctggagcgccgccgggccaagcttgggctgtcccctggggagcctagccctgtgctagggactgtagaggctggacctccagacccggatgagtctgcggtccttctggaggccatcgggccagtgcaccagaaccgattcatccggcaggagcggcagcagcagcagcagcaacaacaacggagtgaagagctgctagcagagagaaagcctgggcctctggaggcccgggagcggagacccagccctggggagatgcgggatcagagccccaagggaagagagtcaagagaagagagactaagtccgagggagaccagagagaggaggctggggatagggggagcccaagagttgagcctgaggcctctggaggctcgggactggaggcaaagcccaggagaggtgggagacaggagctcccgactgtcagaggcatggaaatggaggctgagtcctggagaaactccagagcggagtctgagactagcagagtctcgagagcaaagccccaggagaaaagaggtggaaagtagactgagcccaggggaatctgcctaccagaagttgggcctgacagaggcccataaatggagacctgactccagagagtctcaggaacagagtttggtacaactggaggcaacagagtggaggctgaggtcaggagaagaaagacaagactactcggaagaatgtgggagaaaagaagagtggccagttccaggggtagctccaaaagagactgcagagctgtccgagaccctgacaagggaggcccaaggcaacagttccgcaggagtggaggcagcagagcagaggcctgtggaagatggcgagaggggcatgaagccaacagaagggtggaaatggaccctgaactccgggaaggctcgagaatggacacccagggacatagaggctcaaactcagaaaccagaacctccagagtcagcagagaagcttctggaatctcccggtgtggaggctggagaaggggaggctgagaaggaggaggcgggggctcagggcaggcctctgagagccctgcagaactgctgctctgtgccctcccccctcccaccagaggacgctgggactggaggcctgagacagcaggaagaggaagcagtggagctccagcccccaccaccagcccctctgtctcccccacccccagccccaactgccccccaacctcctggggatcccctcatgagccgcctgttctatggggtgaaggcagggccaggggtgggggccccccgccgcagtggacacaccttcaccgtcaacccccggcggtctgtgccccctgcgaccccagccaccccaacctctccagccacagttgatgctgcagtcccgggggctgggaagaagcggtacccaactgccgaggagatcttggttctggggggctacctccgtctcagccgcagctgccttgccaaggggtcccccgaaagacaccacaaacagcttaagatctccttcagcgagacagccctggagaccacgtaccaatacccctccgagagttcggtactggaggagctgggcccggagcctgaggtccccagtgcccccaaccctccagcagcccaacccgacgacgaagaggatgaggaagagctgctgctgctgcagccagagctccagggcgggctgcgcaccaaggccctgattgtggatgagtcctgccggcggtgaccatcttccaacatagggatatacctccctccttcttataactgaagatcctggagcccggaagattcagggcagacagaccctgataatgagcctggcagggaagggcaaccaacatcttgtaacttgctttccccaccctgtttctgggggcagagccaattgcccaatttctaccctaatccaaagtccctggtgtgggtggggttaaacgtgctggtgcatcctaggtcatccaagagtgagcgccaagtcctgagaaggggcacagaactccctggagggtggagatggagcacctgccccccatggcagggtacactctccccacagccttcctccccaccatcccgtggggactctcgggatttaagcactcgtctctctgggaggcccagaccccactccatttataggcacatctccttcatttcctaggtcactgcccctttgtttacagctcctgcctcctcccttgaccacagcctggtttacaaattccatcagctcccagccccacctgccaaagtcccaggtttacaagccacgcttacttgctgtgtctgcgtggaattctctcctctgtcccctccagtctcctcattggagtgacctgaaggtgtggcttcctccactttttctcagtattactttgccttagttttccccaagagggaaggctggaactcttaactctgtaccccttgatagttatttaattctgtttctcctagtggttcacaattgaactgaattgagatggtgtcgggtggctaaggagacacctcacctctccttccccattgtgccgcctttatcaattgcctgttttgttttgtttgttttttaactttccataataaaatggagttctcttcaaaaaaaaaaaaaaa

SEQ ID NO: 28072 - DNA, 3768 bp, Homo Sapiens
ggcgcgggccgggagcggcgggcaggccgggcatggcgtccatggcggcggcgatcgcggcttcgcgctcggcggtcatgagcgggaaccggcctctggacgaccgggagcgaaagcgcttcacttacttctcgtcgctgagccccatggccaggaagatcatgcaggacaaggagaagatccgcgagaagtacgggcccgagtgggcgcggctgccgcccgcgcagcaggacgagatcatcgaccggtgcctggtggggccgcgcgccccggcgccccgagaccccggggactcggaggagctcacgcgcttccccggcttgcgcgggcccacgggccagaaggtggtgcgcttcggggacgaggatctaacttggcaagatgagcactctgcccctttctcctgggaaacaaagagtcagatggagttcagtatctccgccctatccatccaggagccgagcaacggcaccgccgccagcgagcccagaccactgtccaaagcttcccagggctcccaggccctcaagtcctcccaaggcagcaggtcctccagcctggacgccctgggccccaccaggaaggaggaggaagcgtcattctggaagatcaatgctgagcggtcccgaggggaggggcctgaggccgagttccagtcgctgacccctagccagatcaagtccatggagaagggggaaaaggtcttgcctccctgctaccggcaggaacctgccccgaaggacagggaggccaaggtggaaaggcccagcaccctccgtcaggagcagcgtcctcttcccaacgtgagcaccgaacgtgagagaccccagcctgtccaggccttcagcagtgcactgcacgaggctgccccctcccagctcgaggggaagctgccatctcctgatgtcaggcaggacgatggggaagacaccctgttctcggaacccaagtttgcacaggtcagctcaagtaatgtcgtcttgaagacgggatttgattttctggacaattggtaaaatgtattagaaaaatacaatgaagaaccctaaaatgttttccaaagtggtgtggtggaggaggataaaaagggccaccttttcctatgtattttactggtttcttgacactcttttcttaatcatttggaaactggtcaatattgccagatttttttcttttttggtagaaccagatatatatgctattttcagtgatttgataacagaagttttccatttggaatttttaaggtctgttaataattcaggagatcttgtaaataaaacttctgttcccagctccacccaactttccccctcctcaaaggatgtgtttcaaccatgtcacaaaaatcatataagtgatttccatctccttctccattattccccctcccccctccgctttttaccgtatgggttccttttggtgggtgattgagggtgatgttatcagccatgacatcagcatgctggctgtgaccccggaaagactggcccccagcgacgttctcagccagcgctcgcagctgtccggggcttctctggcagaagccatgtctctcacatcatgtgccagcctccaccctcacgccatttccagggaacagactgcgggtatgtagcagtgtagtctttaacctgctctgatacatattcagagtatggattgttgtttaaaaagagttgcatgtttaaagagttttgtactagcttttcattattttgtatctagattatcaacaatggggctaccactttccttggttttatatccatttcctcttggaagttcttgttgcttatgtgacctgttggttgttccccggactgggcacctacaggagtcagggcagacggcagatgtggctggaggtcagggctcttctgcttagttgtgttagagtcttccagcatgggactgatgggagcagtgggcattctttatcccaagggctagccaggttgcgtcatgacggaccttccccagccctgaccaccaccagaagtggaagagtggagtttgcggtcaactcagcagtgcccatggagacctgcgtggtgtcagagcagcagtatctcttggagctggtgcagacaccaaggctgcccagtggtacaacgtggtccacctcccctagggaagctgctgcactcagaggctgtcctgcccagtggcccctgagccgtgtgagcctgcaggaggcgtctgagcagagcctcaagcccggtatggcgccatctccatgttgccatcactgcgttctcacctgaagccttaatctttgcgacacctgccagtgagcgctcggtttcaataccaaagtgtgtcttcttcttttttttttttttttttaaatgcctgtttcataggaccttctgaaatgatttccagaatattttatctggctccaaaataaagcacatagcaactcacctcaacccctcatcatctccaggaaagtttctgccaaagctgtggcatagccaacttttgatttggttcttgccaattgttttatgtccctaaacctcatttggatccttggggtatagttttatctttctgcttcagtgatttactgtaacttttcaaatattggttctttctgtaccatttaagtatagttgatatatgtgaggcaaaaaaaggtttcagcatggtggtgagggaaaaaggagcttagaaatcccagttggcacagcctgggcaagcgccagctcccctcagggctaacggcactgttcacacagggatcctcagaatcagcggccacctgcctccaccttctgcctggagggcatggggctgttgtagaacctatggtagcaaatgtatatgtatgagtttgtattctgtagtgttggtgtagcacagaagaaagacctgtgtcctagagagtaggccaaggtgatctgcctcttctattgggagaaattctaatttctttcccactttctcaacaagcccaatattccctccaagttcttcttggtgctgagggctgtaggaattattgaaagcttctgcctcacttagtatcgtctggggcccagcacccagcaataactctaataatgtttcttaatggtatagcctcctgagattaaatgtaaaatcaaaaattaggaaatcttggagggagtcctcaagttgtattgctttgctgtgcttttggaagaagggacgacctggaggacacaggctcctgtgtgggtcttcatcctgcctgaccggcagatcttcctctacaccttgggcaaagtctatgcgaagatggtttcttagctctccatttgccatgattttcctcccattcatcatgagggagtttctcaaaccaggagtttatatttattttttagaaaatacacacttttcaggagaaacctgagcatgattttggattctccacctccccccagtctctgcacctgggattcagctcaaggattcagtgtcttcatttttacaaaagttcccccaagaaatcagcaaccagcctctgtttcatctgggagcccctcccttggccccctgggtttgggggtgctgccctactgggaacagcgggggtctgtcacccgtctgagccgcacccccctgtgtggatttcaggaagagcctccctttctttgcgtctccctttctttaattaacattttcaaaagtaataaattcttactgacgacttgtaacttagtcatattttatacttgtagcctttaataaagccatttaaaaaatgctaaaaaaaaaaaaaaaaaa

SEQ ID NO: 28073 - DNA, 7159 bp, Homo Sapiens
tgagggccaggtgcgcaggggagaaacaaggcgccttggagttcaggtgactcccacacgggtcatgctgttgtctcctgatccagccggccctgccaggtgaccatgcctgctctgggcccagctcttctccaggctctctgggccgggtgggtcctcaccctccagccccttccaccaactgcattcactcccaatggcacgtatctgcagcacctggcaagggaccccacctcaggcaccctctacctgggggctaccaacttcctgttccagctgagccctgggctgcagctggaggccacagtgtccaccggccctgtgctagacagcagggactgcctgccacctgtgatgcctgatgagtgcccccaggcccagcctaccaacaacccgaatcagctgctcctggtgagcccaggggccctggtggtatgcgggagcgtgcaccagggggtctgtgaacagcggcgcctggggcagctcgagcagctgctgctgcggccagagcggcctggggacacacaatatgtggctgccaatgatcctgcggtcagcacggtggggctggtagcccagggcttggcaggggagcccctcctgtttgtggggcgaggatacaccagcaggggtgtggggggtggcattccacccatcacaacccgggccctgtggccgcccgacccccaagctgccttctcctatgaggagacagccaagctggcagtgggccgcctctccgagtacagccaccacttcgtgagtgcctttgcacgtggggccagcgcctacttcctgttcctgcggcgggacctgcaggctcagtctagagcttttcgtgcctatgtatctcgagtgtgtctccgggaccagcactactactcctatgtggagttgcctctggcctgcgaaggtggccgctacgggctgatccaggctgcagctgtggccacgtccagggaggtggcgcatggggaggtgctctttgcagctttctcctcggctgcaccccccactgtgggccggcccccatcggcggctgctggggcatctggagcctctgccctctgtgccttccccctggatgaggtggaccggcttgctaatcgcacgcgagatgcctgctacacccgggagggtcgtgctgaggatgggaccgaggtggcctacatcgagtatgatgtcaattctgactgtgcacagctgccagtggacaccctggatgcttatccctgtggctcagaccacacgcccagccccatggccagccgggtcccgctggaagccacaccaattctggagtggccagggattcagctaacagctgtggcagtcaccatggaagatggacacaccatcgctttcctgggtgatagtcaagggcagctgcacagggtctacttgggcccagggagcgatggccacccatactccacacagagcatccagcaggggtctgcagtgagcagagacctcacctttgatgggacctttgagcacctgtatgtcatgacccagagcacacttctgaaggttcctgtggcttcctgtgctcagcacctggactgtgcatcttgccttgcccacagggacccatactgtgggtggtgcgtgctccttggcaggtgcagtcgccgttctgagtgctcgaggggccagggcccagagcagtggctatggagcttccagcctgagctgggctgtctgcaagtggcagccatgagtcctgccaacatcagccgagaggagacgagggaggttttcctatcagtgccagacctgccacccctgtggccaggggagtcatattcctgccactttggggaacatcagagtcctgccctgctgactggttctggtgtgatgtgcccctccccagaccctagtgaggccccagtgctgccgagaggagccgactacgtatccgtgagcgtggagctcagatttggcgctgttgtgatcgccaaaacttccctctctttctatgactgtgtggcggtcactgaactccgcccatctgcgcagtgccaggcctgtgtgagcagccgctgggggtgtaactggtgtgtctggcagcacctgtgcacccacaaggcctcgtgtgatgctgggcccatggttgcaagccatcagagcccgcttgtctccccagaccctcctgcaagaggtggacccagcccctccccacccacagcccccaaagccctggccacccctgctcctgacacccttcccgtggagcctggggctccctccacagccacagcttcggacatctcacctggggctagtccttccctgctcagcccctgggggccatgggcaggttctggctccatatcttcccctggctccacagggtcgcctctccatgaggagccctcccctcccagcccccaaaatggacctggaaccgctgtccctgcccccactgacttcagaccctcagccacacctgaggacctcttggcctccccgctgtcaccctcagaggtagcagcagtgccccctgcagaccctggccccgaggctcttcatcccacagtgcccctggacctgccccctgccactgttcctgccaccactttcccaggggccatgggctccgtgaagcccgccctggactggctcacgagagaaggcggcgagctgcccgaggcggacgagtggacggggggtgacgcacccgccttctccacttccaccctcctctcaggtgatggagactcagcagagcttgagggccctcccgcccccctcatcctcccgtccagcctcgactaccagtatgacacccccgggctctgggagctggaagaggcgaccttgggggcaagctcctgcccctgtgtggagagcgttcagggctccacgttgatgccggtccatgtggagcgggaaatccggctgctaggcaggaacctgcaccttttccaggatggcccaggagacaatgagtgtgtgatggagctggagggcctcgaggtggtggttgaggcccgggtcgagtgtgagccacctccagatacccagtgccatgtcacctgccagcagcaccagctcagctatgaggctctgcagccggagctccgtgtggggctgtttctgcgtcgggccggccgtctgcgcgtggacagtgctgaggggctgcatgtggtactgtatgactgttccgtgggacatggagactgcagccgctgccaaactgccatgccccagtatggctgtgtgtggtgtgagggggagcgtccacgttgtgtgacccgggaggcctgtggtgaggctgaggctgtggccacccagtgcccagcgcccctcatccactcggtggagccactgactgggcctgtagacggaggcacccgtgtcaccatcaggggctccaacctgggccagcatgtgcaggatgtgctgggcatggtcacggtggctggagtgccctgtgctgtggatgcccaggagtacgaggtctccagcagcctcgtgtgcatcaccggggccagtggggaggaggtggccggcgccacagcggtggaggtgccgggaagaggacgtggtgtctcagaacacgactttgcctaccaggatccgaaggtccattccatcttcccggcccgcggccccagagctgggggcacccgtctcaccctgaatggctccaagctcctgactgggcggctggaggacatccgagtggtggttggagaccagccttgtcacttgctgccggagcagcagtcagaacaactgcggtgtgagaccagcccacgccccacgcctgccacgctccctgtggctgtgtggtttggggccacggagcggaggcttcaacgcggacagttcaagtataccttggaccccaacatcacctctgctggccccaccaagagcttcctcagtggaggacgtgagatatgcgtccgtggccagaatctggacgtggtacagacgccaagaatccgggtgaccgtggtctcgagaatgctgcagcccagccaggggcttggacggaggcgtcgcgtggtcccggagacggcatgttcccttggaccctcctgcagtagccagcaatttgaggagccgtgccatgtcaactcctcccagctcatcacgtgccgcacacctgccctcccaggcctgcctgaggacccctgggtccgggtggaatttatccttgacaacctggtctttgactttgcaacactgaaccccacacctttctcctatgaggccgaccccaccctgcagccactcaaccctgaggaccccaccatgccattccggcacaagcctgggagtgtgttctccgtggagggggagaacctggaccttgcaatgtccaaggaggaggtggtggctatgataggggatggcccctgtgtggtgaagacgctgacgcggcaccacctgtactgcgagccccccgtggagcagcccctgccacggcaccatgccctccgagaggcacctgactctttgcctgagttcacggtgcagatggggaacttgcgcttctccctgggtcacgtgcagtatgacggcgagagccctggggcttttcctgtggcagcccaggtgggcttgggggtgggcacctctcttctggctctgggtgtcatcatcattgtcctcatgtacaggaggaagagcaagcaggccctgagggactataagaaggttcagatccagctggagaatctggagagcagtgtgcgggaccgctgcaagaaggaattcacagacctcatgactgagatgaccgatctcaccagtgacctcctgggcagcggcatccccttcctcgactacaaggtgtatgcggagaggatcttcttccctgggcaccgcgagtcgcccttgcaccgggacctgggtgtgcctgagagcagacggcccactgtggagcaagggctggggcagctctctaacctgctcaacagcaagctcttcctcaccaagttcatccacacgctggagagccagcgcaccttttcagctcgggaccgtgcctacgtggcatctctgctcaccgtggcactgcatgggaagcttgagtatttcactgacatcctccgcactctgctcagtgacctggttgcccagtatgtggccaagaaccccaagctgatgctgcgcaggacagagactgtggtggagaagctgctcaccaactggatgtccatctgtctgtataccttcgtgagggactccgtaggggagcctctgtacatgctctttcgagggattaagcaccaagtggataaggggccagtggacagtgtgacaggcaaggccaaatacaccttgaacgacaaccgcctgctcagagaggatgtggagtaccgtcccctgaccttgaatgcactattggctgtggggcctggggcaggagaggcccagggcgtgcccgtgaaggtcctagactgtgacaccatctcccaggcaaaggagaagatgctggaccagctttataaaggagtgcctctcacccagcggccagaccctcgcacccttgatgttgagtggcggtctggggtggccggcacctcattctttctgacgaggatgtcacttctgaggtccagggtctgtggaggcgcctgaacacactgcagcattacaaggtcccagatggagcaactgtggccctcgtcccctgcctcaccaagcatgtgctccgggaaaaccaggattatgtccctggagagcggaccccaatgctggaggatgtagatgaggggggcatccggccctggcacctggtgaagccaagtgatgagccggagccgcccaggcctcggaggggcagccttcggggcggggagcgtgagcgcgccaaggccatccctgagatctacctgacccgcctgctgtccatgaagggcaccctgcagaagttcgtggatgacctgttccaggtgattctcagcaccagccgccccgtgccgctcgctgtgaagtacttctttgacctgctggatgagcaggcccagcagcatggcatctccgaccaggacaccatccacatctggaagaccaacagcttgcctctgaggttctggatcaatataataaaaaacccgcagtttgtgttcgacgtgcaaacatctgataacatggatgcggtgctccttgtcattgcacagaccttcatggacgcctgcaccctggccgaccacaagctgggccgggactccccgatcaacaaacttctgtatgcacgggacattccccggtacaagcggatggtggaaaggtactatgcagacatcagacagactgtcccagccagcgaccaagagatgaactctgtcctggctgaactgtcctggaactactccggagacctcggggcgcgagtggccctgcatgaactctacaagtacatcaacaagtactatgaccagatcatcactgccctggaggaggatggcacggcccagaagatgcagctgggctatcggctccagcagattgcagctgctgtggaaaacaaggtcacagatctataggaacccaggagccacggcctgctgttgcttcagcctggcctgggcagccctggaagctcggaggagaggccaccttcttaggtgcctgtagtgactgacaagcagagttagtggaaggtgactcccagtctcctggtggctctggcctcggccctgctggatccacctcctagacccggggcctcaaggctcatggggtagtacccagcctgctccccgagtccagcgaccctgtgacaccggtctgcagggagttggggactaagggcttccagagagtggctggaagagactccaggcccctggggagactgtactgttcctgaacactggccttggccacactgggattcggagaggaaggaggagagccccatgcttcctgtctgcctcctccaccatccctgacctcagttgagctgcctctggccttgttgctgctgccacatcctaggtctaagagttgaacgcctctcctaggccactacaaactgacccctcagcagggctggctgccacagggctgccctgcctcataggtagccatggtgagggctatctgctgcaggggggtcttggggagagtggtgactccattgacccagcttttcattaaaggataacacactccaaaaaaaaaaaaaaaa

SEQ ID NO: 28074 - DNA, 2365 bp, Homo Sapiens
agaacggcttcaggcgggagctgtgcagctccttatcatggggacaattcatctctttcgaaaaccacaaagatccttttttggcaagttgttacgggaatttagacttgtagcagctgaccgaaggtcctggaagatactgctctttggtgtaataaacttgatatgtactggcttcctgcttatgtggtgcagttctactaatagtatagctttaactgcctatacttacctgaccatttttgatctttttagagacggggtttcaccattttggctgggctggtctcaaactcctgacctcaagtggtccacccacctcggcctaccaaagtgctgggataacaggcgtgagctaccgtgcctgagcaatagtttaatgacatgtttaataagttactgggtaacattgaggaaacctagccctgtctattcatttgggtttgaaagattagaagtcctggctgtatttgcctccacagtcttggcacagttgggagctctctttatattaaaagaaagtgcagaacgctttttggaacagcccgagatacacacgggaagattattagttggtacttttgtggctctttgtttcaacctgttcacgatgctttctattcggaataaaccttttgcttatgtctcagaagctgctagtacgagctggcttcaagagcatgttgcagatcttagtcgaagcttgtgtggaattattccgggacttagcagtatcttccttccccgaatgaatccatttgttttgattgatcttgctggagcatttgctctttgtattacatatatgctcattgaaattaataattattttgccgtagacactgcctctgctatagctattgccttgatgacatttggcactatgtatcccatgagtgtgtacagtgggaaagtcttactccagacaacaccaccccatgttattggtcagttggacaaactcatcagagaggtatctaccttagatggagttttagaagtccgaaatgaacatttttggaccctaggttttggctcattggctggatcagtgcatgtaagaattcgacgagatgccaatgaacaaatggttcttgctcatgtgaccaacaggctgtacactctagtgtctactctaactgttcaaattttcaaggatgactggattaggcctgccttattgtctgggcctgttgcagccaatgtcctaaacttttcagatcatcacgtaatcccaatgcctcttttaaagggtactgatgatttgaacccagttacatcaactccagctaaacctagtagtccacctccagaattttcatttaacactcctgggaaaaatgtgaacccagttattcttctaaacacacaaacaaggccttatggttttggtctcaatcatggacacacaccttacagcagcatgcttaatcaaggacttggagttccaggaattggagcaactcaaggattgaggactggttttacaaatataccaagtagatatggaactaatagtagaattggacaaccaagaccatgatagactctaacttatttttacaaggaatattgactccttggcttccaatttatttagtaatccaactttgcattgactgtttaatcatttactctaaatgttagataatagtagtcttgttcacatttcatgaaacctatgaaactatatttttgtaaaatgtatttgtgacagtgaaatcctcgtaaatgttaaaggctttaaataggcttcctttagaaaatgtgtttctttaaatttggattttggtatctttggttttgtagttgactgcagtgtgatgtgaccttacctttataagagccacttgatggagtagatctgtcacattactaagatacgatatttctttttttttccgagacggagtcttgctctgccactgtgcccggccaatacattattattaacttaaggctgtactttattaaggcttccttagtttttgttttgttttgttttttgagatggagtctcactctgtcgcccaggctggaatgcagtggcatgatctcagctcactgcaacctctgcctcctgagttcaaatgattctcctgcctcagcctcccgagtagctgggattacaggcacctgccaccacgcccagctaatttttgtatttttagtaaagacgggggatttcaccatgttggccaggctggtcttgaactcctgacctcatgatccacccaccttagcctcccaaagtgctgggattaggtgtgagccaccgcacctggccgatattttctttaatgaaatttataaatatgcttcttgaataatacacattttgggaaagggaaaaaaaaaaaaaaaa

SEQ ID NO: 28075 - DNA, 2325 bp, Homo Sapiens
ggaacgaaaaccaccacagcgtcagaaaggagcgggtttgctgagggccccagaaggctccttccaccgtatcatagtctaataaataattttgtcaagccagagaagctaacaaaggtagagacaaggcttaaagaaaagatagtggcggaaatgacggatctgaacaagcatataaaacaagctcaaacccagcggaaacagctactggaggaatccagggagctacaccgagaaaagttacttgtccaggctgaaaacagattctttctggaatacctgactaacaaaactgaagagtacacagagcaacctgagaaggtatggaacagctatttacaaaaaagtggagagattgaacgaagaagacaagaatcagcctccagatatgcagaacaaatttcagtgcttaaaacagcgctcttgcaaaaggaaaatatccaatccagtttgaagcggaagttgcaggcaatgagggacattgctatattaaaggaaaagcaggagaaagaaatacagacattacaggaggagacaaagaaagtccaagctgagacagcttcaaagacacgggaagtacaggcccagctcctccaggagaaaagattactggagaaacaactgagcgagccagacaggaggctactgggaaagagaaaaagaagagagcttaatatgaaggcccaggccttgaagttggcagcaaagcggtttatttttgaatactcctgtggcatcaacagagagaaccagcagttcaagaaggaattactgcagctaattgagcaagcccagaaactaacggctactcaaagccacttagaaaacaggaagcagcagctgcagcaggaacagtggtatctggagtccttaatccaggcgaggcagagactgcaaggaagtcataatcagtgcctaaatagacaggatgttccaaagaccacacccagtcttccccaaggcaccaaatcaaggattaatccaaagtaacttctaaaataacactgattaaataagaactggagcaagtactcttaagtgctacattaacctggttagaaaggctgttggattccagattgctattgtaaaatctccatcatgatgtgttggagtgaaggattagatggttttatccaacagtcctactagatatttggtaaccagcttcccttaactagctttttctttaaatactcgttaataagctattccacaaacctccagttaacctaacacatgaccctaacctagccatttaccatacatcaaactagctaaaggaaaccaacctaaggaagtgaaaacagttgtgatttatttcatctagctaaattgtatttctttatagagaaagtacctttaaggatagcattccaaatagactttgaatagcgttctgccagtttatcctcattccttttgaccaacttagcagacaaaagcagtttttacaagctctttgtgagtttgtgccagtgaccaggtagctccttctattcttctcatgagtgaaaaagcattctgataacagcaagtccagtaagtgctaggcagagtgacctttcatctgatgctaagcccctacaagtttgagaaggtaagaaaagatgaaggagacatatattaggtcagctcttacttttgaaaatgttttatttgaagaaacacctgtagcattgaggtgactgaatgcctccacttatttcaggaaaacgtatccaaaaaaagttgaaatatttggacaactttttttttaagtgccatcgatttccctagcagcattctaaaagatagcaagtaaaatgatgtttgttatcctaaatgctttagttttaggtcatttattaattttcttacaggtgcactttctagtacatgaagtatcctttgtaattaatgtgtgccatatgtttattcccatttagtataactataaattatattttaaattatatatttttaggatagttatattttttttgggttctacgacattgaagttggactagtgatttatttgaatgctgaatcctagtataggggaatataatcttatattttaacaggggtcctctatgggaaaataggatgaactttgtttcccagaaattgttaagtgatgaaaaacttcaaaataattttcctgcattttctgctttatttacatgtaaagtgaattccctgaaaattggatttaaaaagcattctccttcaatgtgcctttaccttgtagctttaacaacttttctgttaaatatgtagttttttattaaacaatgttattaaataaaaacatttatccaccgaaaaaaaaaaaaaaaa

SEQ ID NO: 28076 - DNA, 1876 bp, Homo Sapiens
ggcgcggctccaagaaggcatccgcatttgctaccagcggcggccgcggcggagccaggccggtcctcagcgcccagcaccgccgctcccggcaacccggagcgcgcaccgcaggccggcggccgagctcgcgcatcccagccatcactcttccacctgctccttagagaagggaagatgagtgagtcgagctcgaagtccagccagcccttggcctccaagcaggaaaaggacggcactgagaagcggggccggggcaggccgcgcaagcagcctccggtgagtcccgggacagcgctggtagggagtcagaaggagcccagcgaagtgccaacacctaagagacctcggggccgaccaaagggaagcaaaaacaagggtgctgccaagacccggaaaaccaccacaactccaggaaggaaaccaaggggcagacccaaaaaactggagaaggaggaagaggagggcatctcgcaggagtcctcggaggaggagcagtgacccatgcgtgccgcctgctcctcactggaggagcagcttccttctgggactggacagctttgctccgctcccaccgcccccgccccttccccaggcccaccatcaccaccgcctctggccgccacccccatcttccacctgtgccctcaccaccacactacacagcacaccagccgctgcagggctcccatgggctgagtggggagcagttttcccctggcctcagttcccagctccccccgcccacccacgcatacacacatgccctcctggacaaggctaacatcccacttagccgcaccctgcacctgctgcgtccccactcccttggtggtggggacattgctctctgggcttttggtttgggggcgccctctctgctccttcactgttccctctggcttcccatagtggggcctgggagggttcccctggccttaaaaggggcccaagccccatctcatcctggcacgccctactccactgccctggcagcagcaggtgtggccaatggaggggggtgctggcccccaggattcccccagccaaactgtctttgtcaccacgtggggctcacttttcatccttccccaacttccctagtccccgtactaggttggacagcccccttcggctacaggaaggcaggaggggtgagtcccctactccctcttcactgtggccacagcccccttgccctccgcctgggatctgagtacatattgtggtgatggagatgcagtcacttattgtccaggtgaggcccaagagccctgtggccgccacctgaggtgggctggggctgctcccctaaccctactttgcttccgccactcagccatttccccctcctcagatggggcaccaataacaaggagctcaccctgcccgctcccaacccccctcctgctcctccctgccccccaaggttctggttccatttttcctctgttcacaaactacctctggacagttgtgttgttttttgttcaatgttccattcttcgacatccgtcattgctgctgctaccagcgccaaatgttcatcctcattgcctcctgttctgcccacgatcccctcccccaagatactctttgtggggaagaggggctggggcatggcaggctgggtgaccgactaccccagtcccagggaaggtggggccctgcccctaggatgctgcagcagagtgagcaagggggcccgaatcgaccataaagggtgtaggggccacctcctccccctgttctgttggggaggggtagccatgatttgtcccagcctggggctccctctctggtttcctatttgcagttacttgaataaaaaaatatccttttctggaaaaaaaaaaaaaaaaaaaaaaaaaaaaaa

SEQ ID NO: 28077 - DNA, 3065 bp, Homo Sapiens
gcgcggcgaggatggcggcgcggggccgggggctgctgctgctgacgctgtcggtgctgttggcggcgggcccctccgccgctgcggccaagctcaacatccccaaagtgctgctgcccttcacgcgggccacgcgcgttaacttcacgctggaggcctcggagggctgctaccgctggttgtccacccggccggaggtggccagcatcgagccgctgggcctggacgagcagcagtgctcccagaaggcagtggtgcaggcccgcctgacccagcctgcccgcctcaccagcatcatcttcgcagaggacatcaccacaggccaggtcctgcgctgtgatgccattgtggacctcatccatgacatccagatcgtctccaccacccgcgagctctacctggaggactcccccctggagctgaagatccaggccctggactccgaagggaacaccttcagcactctggctggactggtcttcgagtggacgattgtgaaggactccgaggcggacaggttctcagactcccacaatgcgctgcgaatcctcactttcttggagtctacgtacatccctccttcttacatctcagagatggagaaggctgccaagcaaggggacaccatcctggtgtctgggatgaagaccgggagctccaagctcaaggctcgcatccaggaggctgtctacaagaatgtacgccctgcagaagtcaggctgctgattttggaaaacatccttctgaacccggcctatgacgtctacctgatggtgggaacctccattcactacaaggtgcagaagatcaggcaagggaaaattacagaactctccatgccttccgatcagtacgagttgcagcttcagaacagcatcccgggccccgaaggagacccagcccggccggtggctgtcttggcccaggacacgtcgatggtcactgcactgcagctgggacagagcagcctcgtccttggccacaggagtattcgcatgcaaggtgcttctaggttacccaacagcactatctacgtggtcgaacctggatacctagggttcactgttcaccctggtgacaggtgggtgctggagaccggccgcctgtatgaaatcaccatcgaagtttttgacaagttcagcaacaaggtctatgtatctgacaacatccgaattgaaactgtgcttcctgctgagttcttcgaggtgctctcgtcctcccagaatgggtcataccatcgcatcagggcactaaagaggggacagacggccattgacgcggccctcacctctgtggtggaccaggatggaggggtccacatactacaggtgcctgtgtggaaccagcaggaggtggaaattcacatcccgatcaccctgtatcccagcatcttgacatttccgtggcaaccaaagacgggcgcctatcagtacacaataagggcccacggtggcagtgggaacttcagctggtcttcgtcaagccacctggttgccacagttactgtcaagggcgtgatgaccacaggcagtgacatcgggttcagtgtgatccaggcacatgatgtgcagaacccactccatttcggtgagatgaaggtgtatgtgatcgagccccacagcatggagtttgccccgtgccaggtggaggcacgtgtgggccaggccctggagctgcccctgaggatcagtggcctcatgcccggcggggccagtgaggtggtcaccttgagcgactgctcccactttgacttggctgtcgaggtggagaaccagggtgtgttccagccactcccagggaggctgccgccaggctctgagcactgcagcggcatccgggtaaaggccgaggcccagggctctaccacgcttcttgtgagctacagacacggccacgtccacctgagtgccaagatcaccattgctgcctacctgcccctcaaggctgtggatccctcctctgttgccttggtaaccctgggctcctcaaaggagatgctgtttgaaggaggtcccagaccttggatcctcgagccgtccaaattcttccagaacgtcaccgctgaggacactgacagcatcggcctggctctctttgccccccattcctcccggaattatcagcaacactggatccttgtgacctgtcaggccttgggtgagcaggtcatcgccctgtcggtggggaacaagcccagcctcaccaacccctttcctgcggtggagcctgccgtggtgaagttcgtctgcgccccaccgtccaggctcaccctcgcgcctgtctacaccagcccccagctggacatgtcctgtccgctgctgcagcagaacaagcaggtggtcccagtgtccagccaccgcaacccccggctggacctggctgcttacgaccaggagggccgccggttcgacaacttcagctctctgagcatccagtgggagtccaccaggccagtgttggccagcatcgagcctgagctgcccatgcagctggtgtcccaggacgatgagagtggccaaaagaagctgcacggtttgcaggccattttggttcacgaggcatcaggaaccacagccatcactgccactgccactggctaccaggagtcccacctcagctctgccagaacaaagcagccgcatgaccctctggtgcctctgtcggcctccatagagctcatcctggtggaggacgtgagggtgagcccagaagaggtgaccatctacaaccaccctggcatccaggcagagctccgcatcagggaaggctcaggttacttcttcctcaacaccagcaccgcagatgttgtcaaggtggcctaccaggaggccaggggtgtcgccatggtaagcttgggccatcggtccccactgttggttttcattccttatctgggctgttgtgtggttaattgattgatcattttgaaagctagcacttgactcacactcggaatcccagaactttgggaggtcaaggcaggaagatcacttgagcccaggagttcaagaccagcctggacaatatagtgagacccccatctctacaaaaaaaaaaaaaaaaaa

SEQ ID NO: 28078 - DNA, 4170 bp, Homo Sapiens
ctttagtaaaacgtggctcctccgggacctggaaattttgtccatcatgctgtactcctcaaaaaaggagatcaacgctttggctgagcacggagacctagagctggatgagcgaggggaccgagaggaagaggtggaacggccagtcagcagccctggcgacccagagcagaaaaagctggacccccttgagggcctggatgagcccaccagaatatgtttcttgatggctcatgatgccctcaatgcccctctgcacattctccgggccatatacgaactgcagatgaaaaagaccgattatttcttcctggaggttcagaagaggtttgatggtgatgagctcaccacagatgaaaggatacggtccctggctcagcggtggcagcccagtaagagtctgaggctggaagaacagagcgccaaagctgtggatacagacatgattatcctgccatgcttgtcccggcctgcacgctgtgaccaagccactgctgaatcgaaccctgtgacccagaagctgatctccagcacagagagcgaactgcagcagagctatgccaagcagcgccgtagcaagagcgccgccctcctgcacaaggagctgaactgcaagagtaagagggctgtccgggactacctcttccgagtgaacgaggccacagctgtcctgtacgcccgccacgtgcttgcatccctgctcgccgagtggcctagccacgtgccagtgagcgaggacatcctggagctcagtggccctgcccatatgacctacattttggatatgttcatgcagctggaagaaaagcatgagtgggagaagatcctgcagaaagtgctccagggctgccgagaggacatgctggggaccatggccctggctgcatgccagttcatggaggagccaggaatggaggtgcaagtgagggagtcgaaacacccgtataacaacaacaccaacttcgaggataaagttcacattcctggtgccatctacctctcaatcaaattcgactctcagtgcaacacagaggagggctgtgacgagttagccatgtccagcagcagtgacttccagcaagaccgacacagcttcagcgggtctcagcagaagtggaaagattttgaacttccaggagacactctgtattaccgcttcacctccgacatgagcaacaccgagtggggctacagattcaccgtgacggccggacacctggggcggttccagacaggattcgagattttgaagcagatgttgtcagaagaaagggtcgtgcctcatctcccattggcaaaaatttgggaatggctggtgggcgtggcctgtcgccagactggccatcaacgattaaaagccatccacttacttctgaggattgtgcgatgctgcggccacagtgacctgtgtgaccttgcgctgttgaagcccctgtggcagctctttacccacatggagtacggcctgtttgaggacgtgacgcagcccggcatcctccttcccctgcatcgtgccctcactgagctcttcttcgtcaccgagaaccgtgcccaggagcttggcgtgctgcaggattacctgctggccctaaccacggacgaccaccttctccgctgtgcggcacaggctctgcagaacattgctgccatcagcctggccatcaactacccaaacaaggccacccgcctctggaatgtggagtgttagcccttggtggggcgtgcatgggactagttcatctgccacagggattttagagcagacatctaacctcattcaggaaaactcctgtagcgccagtgcccagctctccttgagctgaccactccagttaggatgccaagcagccacgtctccaagagctcccgtgcgtaggctggacacaagcacaggctgtagcatggtgaaaataagccaagcagtgcagaatgcctcagaaagggtgggcagggggcccttaagaaggttcagagaccagccttctccagaggctgtcactgcaggagccgtgggcctgggaagacttggaagcggcctctctcaactggtttctgtctccgtggagctggaactgcctgcacttgccttcagagggaggcacagtccacccagatccacctttccagcaagacccccagtggctgcccagcctgggagcacctctttgcttttcacaccaaaccaaaactggcgagagcccctcctagccaccagtgatccccaagcatccagtacagaaccaggcatcgagctagctccctgcacggccgcaccctcccagagaactccttgaggagaacaagtgcccttggggacagccggcaggcgcccctgtacgtctgctcatgcaccaggcagcacagccgcagttcctcagttgttgttttgacatatttcagtttccacctcacgtttttagagcagaaccacactgtctccctggaggggctcgagggcatgaccggggactgaccattctgtgaaaggagcagaatgtgaggagcacgcgtgagcttatgtaccgtgaagatgatcagaggatatcttattttaagagtaaaaacccacataattttatttctgcttgatagtcatggtagtctgtcatacccacctctgggactctgcgtggctgtttggctgtcacttgtagcaataacgacattagttctagtcagtgctgttttacatttttcttttgatgggtttagtcttgccctggagtgccgatgatgattctccctccagagccacgcttgggaacatgaagcaagtctggcgtgtgggctgcgtgccggccttagtgggacccgtggggttggagcatgcctttaggggcagtgtctgggccgaagcacgtcccaccacacagtgccagagccagagaaggggccccaccaccaaggccaagcttgaccaggtcagcattgccatggcccagtgtgccccgtggcctctgaagatccctctgtgcagggtctgcagggatctggattgcaagggcccaagtctgcaggtctggaagcatcttcctataagagcactttcgccttctgggtcaggactccaaggtgcagcgggcttcacagccctacaattgggttctcagctaagccccagagttctggtagaaccatcccggggcgggtggagggtgggatttaagggagacgggaacacatggggcaggtcctggaacttggtggcctgaggactgaggccattgccctggtggaaaggcctggcctggttcctgtggcttgggacctgaataggcaggtgctgctggctccgtagaaacccttttcccatcttttgctctttgccaaacctaccttgctttgggagctgcctgcaccaccccagagaaggccccaccttcttcatccctcagacccgaggaggcctcccagtaaggagtttcccaagaggggactcacaggaaacaagtcttagtgcttgggagggaggccccgctgcgtgctcagactcacagccaacctggaaggtagacgagatagcgccacccacgcccctccacaccccagactccgagtaaagcgggcggtagggccggagtcacctcccctatggcagtggccgccgctgtactccatcctcccgtcaggaagatcagctgtaaataaacgctgggctccccagagcacctgtccgcccactgcccttgctgttctgggatcttcgctgcagttcacgggaaacaagcctgagtccgctcgcacccgcggctgctctcccggctcggcccggccgcctctgtctccggccaccgggtggcgctgccgagccagagccgccgcgtcccggcgctttccaggagccccaggcccggaggaggcgaagcccgcagagcaaaggtggaaacacgtgcctacgctgtaaagaaatcctgttccagagcatacctgttgtacaaacagacactgttcctaacgagaggagtgacgtattttcatcaccgtttttaatttgttttcttacgggtttacgattttgaatttttcttatttggttgaaagaattttgattctatcagcctgagtgagttcagcctgtaaaaaggatgttaagctgtgggtaaaatatgcaaacgaaaagaaatatattgtacaaattctatataataaggtaaaaaaaaaaaaaaaaaa

SEQ ID NO: 28079 - DNA, 2493 bp, Homo Sapiens
catgaagccgcagccgcccggctaggccccgggcggctctagcccagggcggcccgcggggcgctgggcctggctcccggctccggtttccgggccggcgggtggccgctcaccatgcccggcaagcaccagcatttccaggaacctgaggtcggctgctgcgggaaatacttcctgtttggcttcaacattgtcttctgggtgctgggagccctgttcctggctatcggcctctgggcctggggtgagaagggcgttctctcgaacatctcagcgctgacagatctgggaggccttgaccccgtgtggctgtttgtggtagttggaggcgtcatgtcggtgctgggctttgctggctgcattggggccctccgggagaacaccttcctgctcaagtttttctccgtgttcctcggtctcatcttcttcctggagctggcaacagggatcctggcctttgtcttcaaggactggattcgagaccagctcaacctcttcatcaacaacaacgtcaaggcctaccgggacgacattgacctccagaacctcattgactttgctcaggaatactggtcttgctgcggagcccgaggccccaatgactggaacctcaatatctacttcaactgcactgacttgaaccccagccgggagcgctgcggggtgcccttctcctgctgcgtcagggaccctgcggaggatgtcctcaacacccagtgtggctacgacgtccggctcaaactggagctggagcagcagggcttcatccacaccaaaggctgcgtgggccagtttgagaagtggctgcaggacaacctgattgtggtggcgggagtcttcatgggcatcgccctcctccagatctttggcatctgcctggcccagaacctcgtgagtgacatcaaggcagtgaaagccaactggagcaaatggaatgatgactttgaaaaccactggcttacgcccaccatttccgaggtcctgtccacggcggggcctcagcagaactctctgactggggcccctggcccggccccacccagccgacatgttttctttggcctgggtggtttataccctgagccaacctttaaaaattggtagatttcacataaaagtccagatccacagcttctcttgaagaatgaccacctggctacgccggctcttcggtggcaacactacctgggacactgcctccccagtcaccaagggccccagctggcccgttctactcacctaagtgccgcctgacccttgtacactaggagctggcctcccacctctgcagggttatttcctgcacctcgaggccgctgcgggccaatctggagtgaaacacggggacctgaaggatggagaggctggaccccgctttgaagagggtgcagcctgggaagggcggccttgctggggactgcggtgggagtagagtgcccaggagagggtctgaggggtgggatgggggtcaggacaattttgcaaaagaagtagctggaagccatgggactggcgggagcctgtttgggggatctggatggttgactcctaggagtcaagttcagcatcttcgccgtggctgcagagctgcctgatgggcactagagggcacgccagccccacactccctgggtctggcttcctcccgcaacctcactctagtagagcctgtgcctgcctactagcgctctggggttcggagagtttgggaatttctcagagccaactggctcaggcttgggaaggctggctgctgccctcagctccgcctcatcagctatgtgaaggggtgtgtatggagtgatcctgccgccccctccctgggctggtccagagatctcaaactccgatgcccctggggccacgtatgttgtgtaaatggatgaaacaggcccttgagttgggagcctgcttcactttgactttcccactgttgctggagacaaagacatcgtgatgagagaaagttcgcacaatctagtcggtaacagccactttccttgagaccaagagagtgcggtggggatgggggggagagcacgggtccccgtctgacagtggccgctgccatattcaggtgtagctaattgctctggtgtgggaatgcaggcctaatgacagaaatctggagaagccagaaatacagatttgtatgtgagatgtcctgattttttaagttgttggcagaaattaattcagaaatcaaatctgcaggccaaacaaggtgcaggacccagctttggccccatgcccctgtaggtccctctgggacagtcaccgctggggtcctggctgctctgtcattgagggatgctgggcactgctgccgggtggccagggtatggggcatgtgcccagcaatgtggctccttggccccgctggccagtgtcctgggcccctgacaggcgctggctgtgagtggtttgtacatgctacaataaatgcagctggcagcaaaaaaaaaaaaaaaaaaaaaaaaaaaaaaaaaaaaa

SEQ ID NO: 28080 - DNA, 4535 bp, Homo Sapiens
ggcttttattgctgtagtttatttccacccccttccctcctgtttctctctctccttctctctctctctctctctctcttttttttccgccctagctggggctgtgttggaggagaggaagaaagagagacagaggattgcattcatccgttacgttcttgaaatttcctaatagcaagaccagcgaagcggttgcacccttttcaatcttgcaaaggaaaaaaacaaaacaaaacaaaaaaaacccaagtccccttcccggcagtttttgccttaaagctgccctcttgaaattaattttttcccaggagagagatgtcttatcaggggaagaaaaatattccacgcatcacgagcgatcgtcttctgatcaaaggaggtaaaattgttaatgatgaccagtcgttctatgcagacatatacatggaagatgggttgatcaagcaaataggagaaaatctgattgtgccaggaggagtgaagaccatcgaggcccactcccggatggtgatccccggaggaattgacgtccacactcgtttccagatgcctgatcagggaatgacgtctgctgatgatttcttccaaggaaccaaggcggccctggctgggggaaccactatgatcattgaccacgttgttcctgagcctgggacaagcctgctcgctgcctttgaccagtggagggaatgggccgacagcaagtcctgctgtgactactctctgcatgtggacatcagcgagtggcataagggcatccaggaggagatggaagcgcttgtgaaggatcacggggtaaattccttcctcgtgtacatggctttcaaagatcgcttccagctaacggattgccagatttatgaagtactgagtgtgatccgggatattggcgccatagcccaagtccacgcagaaaatggcgacatcattgcagaggagcagcagaggatcctggatctgggcatcacgggccccgagggacatgtgctgagccgacctgaggaggtcgaggccgaagccgtgaatcgtgccatcaccatcgccaaccagaccaactgcccgctgtatatcaccaaggtgatgagcaaaagctctgctgaggtcatcgcccaggcacggaagaagggaactgtggtgtatggcgagcccatcactgccagcttgggaacggacggctcccattactggagcaagaactgggccaaggctgctgcctttgtcacctccccacccttgagccctgatccaaccactccagactttctcaactccttgctgtcctgtggagacctccaggtcacgggcagtgcccattgcacgtttaacactgcccagaaggctgtaggaaaggacaacttcaccctgattccggagggcaccaatggcactgaggagcggatgtccgtcatctgggacaaggctgtggtcactgggaagatggatgagaaccagtttgtggctgtgaccagcaccaatgcagccaaagtcttcaacctttacccccggaaaggccgcattgctgtgggatccgatgccgacctggtcatctgggaccccgacagcgttaaaaccatctctgccaagacacacaacagctctctcgagtacaacatctttgaaggcatggagtgccgcggctccccactggtagtcatcagccaggggaagattgtcctggaggacggcaccctgcatgtcaccgaaggctctggacgctacattccccggaagcccttccctgattttgtttacaagcgtatcaaggcaaggagcaggctggctgagctgagaggggttcctcgtggcctgtatgacggacccgtgtgtgaagtgtctgtgacgcccaagacagtcactccagcctcctcggccaagacgtctcctgccaagcagcaggccccacctgtccggaacctgcaccagtctggattcagtttgtctggtgctcagattgatgacaacattccccgccgcaccacccagcgtatcgtggcgccccccggtggccgtgccaacatcaccagcctgggctagagctcctgggctgtgccgtccactggggactggggatgggacacctgaggacattctgagacttctttcttccttcctttttttttttttgtttttttttttaagagcctgtgatagttactgtggagcagccagttcatggggtcccccttggggccccacaccccgtctctcaccaagagttactgattttgctcatccacttccctacacatctatgggtatcacacccaagactacccaccaagctcatacagggaaccacacccaacacttagacatgcgaacaagcagcccccagcgagggtctccttcgccttcaacctcctagtgtctgttagcatcttccttttcatggggggagggaagataaagtgaattgcccagagctgcctttttcttttctttttaaaaattttaagaagttttctttgtggggctggggaggggccggggtcagggagagtcttttttttttttttttttttaaatactaaattggaacatttaattccatattaatacaaggggtttgaactggacatcctaatgatgcaattacgtcatcacccagctgattccgggtggttggcaaactcatcgtgtctgtcctgagaggctccacaatgcccacccgcatcgccattctgtagtcttcagggtcagctgttgataaaggggcaggcttgcgttattggcctagattttgctgcagattaaatcctttgaggattctcttctcttttaccatttttctgcgtgctctcactctctctttctctctctagctttttaattcatgaatattttcgtgtctgtctctctctctctctgtgtttcctccagcccttgtctcggagacggtgttttcctcccttgccccattatcttttcacctcccaggtctaccatttcatggtggtcgttgggtccgcctaaaggatttgagcgtttgccattgcaagcatagtgctgtgtcatcctggtccatgtaggactggtgctaaccacctgccatcatgaggatgtgtgctagagtgtgggaccctggccaagtgcaggaatgggccatgccgtctcacccacagtatcacatgtggaaccgcagacagggcccagaagctttagaggtatgaggctgcagaaccggagagattttcctctgtgcagtgctctctggctaaagtcacggtcaaacctaaacaccgagcctcattaacccaagtgaaccaaccaaagtcaccagttcagaagtgctaagctaataggagtctgacccgagggcctgctgcttcctggttaagtatcttttgagattctagaacacatgggagctttttattttcggggaaaaaccgtatttttttcttgtccaattatttctaaagacacactacatagaaagaggccctataaactcaaaaagtcattgggaaacttaaagtctattctactttgcaagaggagaaatgtgttttatgaacgatagatcacatcagaactcctgtggggaggaaaccttataaattaaacacatggcccccttagagaccacaggcgatgtctgtctccatccttccctctccttttctgtcacctttccccctagctggctcctttggacctacccctgtccttgctgacttgtgttgcattgtattccaaacgtgtttacaggttctcttaagcaatgttgtatttgcaggcttttctgaataccaaatctgctttttgtaaagcgtaaaaacatcacaaagtaggtcattccatcaccacccttgtctctctacacattttgcctttggggatctggttggggttttgggttttttgttgttgttgtttatttgttattttaaaggtaaattgcacttttaaaaaaataattggttgacttaatatatttgctttttttcttacctgcacttagaggaaatttgaacaagttggaaaaaaacaatttttgtttcaattctaagaaacacttgcagctctagtattcacttgagtcttcctgtttttcctgtaccgggtcatggtaatttttggttgttttggttgttttcttaaaaaacaagttaaaacctgacgatttctgcaggctgtgtaagcatgtttacctgttggcttgctttgtgtgtctgttaaatgaatgtcatatgtaaatgctaaaataaatcgacagtgtctcagaactgaataactgcagtgacttgatgctctaaaacagtgtaggatttaagaatagatggtttttaatcctggaaattgtgattgtgacccatgagtggaggaactttcagttctaaagctgataaagtgtgtagccagaagagtacttttttttttgtaaccactgtcttgatggcaaaataattatggtaaaaaacaagtctcgtgtttattattccttaagaactctgtgttatattaccatggaacgcctaataaagcaaaatgtggttgtttcaaaaaaaaaaaaaaaaaaaaaaaaaaaaaaa

SEQ ID NO: 28081 - DNA, 3270 bp, Homo Sapiens
gtccgcgggaagatggcggcgccgctcatccccctctcccagcagattcccactggaaattcgttgtatgaatcttattacaagcaggtcgatccggcatacacagggagggtgggggcgagtgaagctgcgctttttctaaagaagtctggcctctcggacattatccttgggaagatatgggacttggccgatccagaaggtaaagggttcttggacaaacagggtttctatgttgcactgagactggtggcctgtgcacagagtggccatgaagttaccttgagcaatctgaatttgagcatgccaccgcctaaatttcacgacaccagcagccctctgatggtcacaccgccctctgcagaggcccactgggctgtgagggtggaagaaaaggccaaatttgatgggatttttgaaagcctcttgcccatcaatggtttgctctctggagacaaagtcaagccagtcctcatgaactcaaagctgcctcttgatgtcctgggcagggtctgggacctcagtgacattgacaaggatgggcacttggatcgagatgagttcgctgtggccatgcacttggtgtaccgagccctggagaaggagcccgtgccctccgccctgcccccgtccctcatcccaccctccaagagaaagaagactgtgttccctggcgccgtccccgtcctgcctgccagccccccaccaaaagacagcctccgctccacgccgtcccacggcagcgtcagcagcctcaacagcacagggagcctgtcccccaagcacagcctcaagcaaacacagccaacagtgaactgggtggtgcccgtggcagacaagatgcgatttgatgagatattcctgaagaccgacctggacctggatggctacgtgagtggccaggaggtgaaggagatcttcatgcactcgggcctcacccagaaccttctagcacacatatgggccctggccgatacgaggcaaacggggaagttaagcaaagaccaattcgcgttagctatgtatttcattcagcagaaggtcagtaaaggcatcgaccctcctcaagtcctctcgccggacatggtcccgccttcggagagaggcacgcccggcccggacagttcaggctctctcggctccggggagtttactggcgtgaaggagcttgatgacatcagtcaagagattgcccagttacaaagagagaaatattcactggaacaagacattcgagaaaaggaagaggcaatcagacagaaaaccagcgaggtgcaggaattacaaaatgacctagaccgggaaacaagcagtttgcaggagctcgaggctcagaaacaggatgctcaagaccgcctggacgagatggaccagcagaaggccaagctccgagacatgctgagcgacgtccggcagaagtgccaggatgagactcagatgatctcatcactgaaaacgcaaatccaatctcaggaatctgacttaaagtcccaggaagacgatctgaaccgagccaagtcggagctgaaccgattgcagcaggaggaaacccagctggagcagagcattcaggctgggcgagtccagctggaaaccatcatcaagtccctgaagtcaacgcaagacgaaatcaaccaggcaaggagcaaactttcccagctgcatgaaagccgccaggaggcccacaggagcctggagcagtatgaccaggtgctcgatggagcccatggtgccagcctgaccgacctggccaacctgagcgaaggcgtctccctggcagagaggggcagttttggagccatggatgatcctttcaaaaataaagccttgttatttagcaacaacacgcaagagttgcatccggatcctttccagacagaagaccccttcaaatctgacccatttaaaggagctgaccccttcaaaggcgacccgttccagaatgacccctttgcagaacagcagacaacttcaacagatccatttggaggggaccctttcaaagaaagtgacccattccgtggctctgccactgacgacttcttcaagaaacagacaaagaatgacccatttacctcggatccattcacgaaaaacccttccttaccttcgaagctcgacccctttgaatccagtgatcccttttcatcctccagtgtctcctcaaaaggatcagatccctttggaaccttagatcccttcggaagtgggtccttcaatagtgctgaaggctttgccgacttcagccagatgtccaagcccccaccttctggccctttcacctcctccttgggaggggcaggattctcagatgacccctttaaaagtaaacaggacactcctgctctgcctccgaagaaacctgctcctccacggcctaaaccgcccagcggtaaaagtacacctgtaagccagcttggttccgcagactttcccgaggcccccgatccattccagccactcggggctgacagcggcgacccgttccaaagtaaaaaggggtttggggacccgtttagtggaaaagacccatttgtcccctcctctgcagctaaaccttctaaggcctctgcctcgggctttgcagacttcacctcttttggcaatgaggagcagcagctggcgtgggccaagcgggagagcgagaaggcggaacaggagaggctggcgcggctgcggcggcaggagcaggaggacctggaactggccatcgcgctcagcaaggctgacatgcctgccgcctaggcgagggccgtgtgtaggcgggacagggcacgggcgggttccagagagggggcagtgcagatgtctatatatacacacacacaccgtcgccaccgtactccaaggaccgggactcgggggcttgttcagggtgagcagactcggctgcaagacctggaaaggtcacatctcctggggaagcccttacagaggccttggccaccacttctgcaggtccgtctctccactgtgccatcccccccggggctgactgcctcccgctcttcctctggggacgaacacacagcggtcagtcgaggagaggaagcacccagggcttccccgcctcctccctactcatagctgcagacatccccgcccgccctcccacgcatcagtcagacactcccccagtggtgtatgcactcgttgtataaaatgaagtttgaatgattaatataaaatattttaatacaaaaaaaaaaaaaaaaaaaaaaaaaaaaaaaaaaaaaaaaaaaaaaaaaaaaaaaaaaaaaaaaaaaaaaa

SEQ ID NO: 28082 - DNA, 2762 bp, Homo Sapiens
ggtcaagcgggcgctcccccatctccgccgctattaccactgaacccggaccccctacccaggtccagggccagccgccatgacgaacgtgtactccttggatgggattctggtgtttggtttgctctttgtttgcacctgtgcctacttcaagaaagtacctcgtctcaaaacctggctgctatcagagaagaagggtgtttggggtgtgttttacaaagccgctgtgattggaaccaggctgcatgctgctgtggcaattgcttgtgttgtaatggccttttacgtcctgtttataaaatgaattccaaagcacccaagtcatcaactgccaaccaaggggacggggatgaagaacctgttggagacctgaacccagtgtaggagagttcagctgaaatcatcggtccccaggatgacaccacagcatctgcccctgctatatgtggggaaaactcatggtcacgaacattatttatgcttcaggggactacagaaagccagcttcctttgatctatgtgtaaatcagtccttggcagagtgcatataatgtccggataaattacacccctcggtgataagattacatacctccttcataaaaacctgtcatcctgttttgttcttcagctcctcatcaggatcttttcaaactgaggctcattagggaaggaactaggctgtgttcagacttcttttgaagagagagaattttcaagacttcttttcactctttgatttggatctggcaaattggggaggggatgctgggtgggaaacagttatgaaatgccaagaaattctttggctttagaaatttatctttcatgtacccatccgggaacataaaagagaggcatagtgctcattgcaaaaagagaacagatgaagtagctgtgttatgtgctggtatcttgagagttttgccaagaaaatctgggcctacataaaatttgagaattatctgtgtgatgagaccagaaagcagtggcttagacaagaaaaaatctttctgttcaccagtatcctcaaatggagacttcacttgatcagatggtatatgaaaaatgaatcaactattgctatttcgtaaaacctttttatattttctaaatttacttagtgctaaatactgttactcagttttaaatgccacgactaggggaaaaagaaactattgaagaaataattgtttagtatatttgcagttggggtagaagaaagaaatctagtatattgattcatatactagtaaattcatctagtataagaacttgtgatgttagattgaagttttgtcatcttataaaagacaacaaacttattttctgtttaagtctgagtgttatggcaatttttagttgattacttatttttcttagccaaattttaattttcttcatattgcattgctctttagttgtctctggaaattctatttactttaaggacatgagaaattcaaatgagagaagttgctgatattcatcagtgtgtttggacagttcatagggtccacaaatcaaatgaggttgtttcctgaagtagaagaaaacagaactttgcaattgatactgaagtactttgccatggagttagtaactcctgagcagaccattttagatggctcagcatttggcaggaagacttctccattccctgcttatatctatggaaggatcagctgttggatgtctagaacttctctatttaaaaaaaagagtaggtctaaaattaaattattataagcaagcatagacatgggtcttccagttgaattgtccattaccgtaaaacttaatggtggacaagttagctgtggttgattcctgtgtggcagtaaattgtcttctgtctgcttactccaaataataaaagctgctaggaagtttagattttgaaataggcagtttaatgctttgagggtttctagaaatacagaaagtcatcaagtaaacactgcatgtctaatcatctcagagttgtggctgttatctcttcaggaattggtccacagggtaaatttcaacaattcatacgttttccattgtcatttctgaggacctttgagatgagagaaaggaaatctagtggaacaggaaagagagttacaccttgtgggtgtgagtttgggacctgttggcagaagggaatgtcactccctggaaacaggttcagcatgtttgcacttgttattttgtagctttaatgatttttgttttctaatagggcaaatgtctctaagcttggtgtttagagctgcttcatattttaaactagttccattccacagttctagttcaaaccagtttttacagcctcctgggtgggtcgtcttgacccaaactcttgtgttgttacattttgagaggttttcataccagaatgtaccaaaaagtgcacaaggtaaaggtaatttacagccagaaacaaatatacatttgtttcatttcttgactttccctaagcagataagcagaaacttgtttaactcattactttgtttgatgtgtcttacatatttttgactaaaagttatagaatgttattcctctgggggaatcttttacaggtggaggaatggggatagcagtattgcctcagattcaaactggcatcaccataaaccctgtaggccagggtggaatgaagtcagctcctttttatagttgaaatacaattttttattcaccattgtctgcacaaatccttgaaaataaacctttttttccctacaaaaaaaaaaaaaaaaaaaaaaaaa

SEQ ID NO: 28083 - DNA, 1750 bp, Homo Sapiens
gggggggagggcggctcgcaggcaccatgactcctgtgaggatgcagcactccctggcaggtcagacctatgccgtgcccctcatccagccagacctgcggcgagaggaggccgtccagcagatggcggatgccctgcagtacctgcagaaggtctctggagacatcttcagcaggtgggtgctgccacccacccccacctgatgagagggccatccctgtcctgggcaatcccagcaacacaccctctgggagcagcccccttggggaatcccggtcctggggaacccatctggcttccctgtgtgggaggggctgaagtgagagcccaacttggaagcttttactcctgggagtccgagagctcactcccttccaccccacttagcctcctggtttcctgtggtggctctgctctcacaactcatgcttttcctcccattggagggcctattccttcacgttttcctgcagccaacaaatatttacccagcagtgctcgtgtgcaaggcagtgtgggaatctctatatatccagccacggataaggcaacatacctctccacctggagcgcacattctggcaggagagaaagacctaaataagcaatagatgattagttcttcaataacagttgtgacaaggtctattgataatattttgtaatcactaatattcatataaaccgtgcacaaccattgatttgagtgcattaactcacacttcatgagcaggcactgccgtcatctcattttatagatgaggaaactgaggcacagaaaggctgagagacctggcctagtgacagagccaggattcaaagccatagatcatggccccgggttatgtaggttattactgcatctgttcaggggagatggggtactgtgaggctcgtcatgggaagcctggcttggtctcaggtcagggaaggcagatgtgaggaaatgacatttatggtaaagtctgagggttgagtgggtaggttgggaagaacattccagaaagaagcacatgaactacagcctggaggtggaggacctaaaaggaagccagcatggctggagcacggagtggccattgagggaggcgagctggagggctgcagcttcttgtattggcagtgctgacctcgcacagtccttgggctccagtgacttcactcagtgtttatctaacatgagtgagtgaatggtgtttgctgtttttttggtaaaggtcccaggggttgtcgggtacacaggtcctgtctttggccataagcaaactgaaatgaggcttggtctccttcccaggatcccacaccatgcctcacatggtagaccccagtgggaagtatgtgactgcctgactcaggtgcctctcgtggtccaagccatccctgccctgtcccttccctggttgtcgccagacctggagcccctgctccttcactttgcagcctcctcttctgtcaccaactgggaacccacctcttcctgaaagtcctcccccactgactcaccggcttgccccgagcttgtcaagaatgtcccagtaaccaggggacacacactgaagtgactgaggggttaccttggagttgatgccttggctcagatccagctcccctgttttcttcctctgtaaccttgggcaacccaacccctctaagcctcggtgttctcatttgtgaagttgtggtaataatggtagcttcctggtagaattattgtaaatacaaaaaaaaaaaaaaaaaaaaaaaaaaaaaa

SEQ ID NO: 28084 - DNA, 2692 bp, Homo Sapiens
caccgactacggctcctcgctcaccgtcacgctgccgcccgagctgcaggcgcaccagcccttccaggtcatcctgcggtacacctcgaccgacgcccccgccatctggtggctggacccagagctgacctatggctgcgccaagcccttcgtcttcacccagggccactccgtgtgcaaccgctccttcttcccgtgcttcgacacacctgccgtgaagtgcacctactctgccgtcgtcaaggcgccatcgggggtgcaggtgctgatgagtgccacccggagtgcatacatggaggaagaaggcgtcttccacttccacatggagcaccccgtgcccgcctacctcgtggccctggtggccggagacctcaagccggcagacatcgggcccaggagccgcgtgtgggccgagccatgcctcctgcccacggccaccagcaagctgtcgggcgcagtggagcagtggctgagtgcagctgagcggctgtatgggccctacatgtggggcaggtacgacattgtcttcctgccaccctccttccccatcgtggccatggagaacccctgcctcaccttcatcatctcctccatcctggagagcgatgagttcctggtcatcgatgtcatccacgaggtggcccacagttggttcggcaacgctgtcaccaacgccacgtgggaagagatgtggctgagcgagggcctggccacctatgcccagcgccgtatcaccaccgagacctacggtgctgccttcacctgcctggagactgccttccgcctggacgccctgcaccggcagatgaagcttctgggagaggacagcccggtcagcaaactgcaggtcaagctggagccaggagtgaatcccagccacctgatgaacctgttcacctacgagaagggctactgcttcgtgtactacctgtcccagctctgcggagacccacagcgctttgatgactttctccgagcctatgtggagaagtacaagttcaccagcgtggtggcccaggacctgctggactccttcctgagcttcttcccggagctgaaggagcagagcgtggactgccgggcagggctggaattcgagcgctggctcaatgccacaggcccgccgctggctgagccggacctgtctcagggatccagcctgacccggcccgtggaggcccttttccagctgtggaccgcagaacctctggaccaggcagctgcctcggccagcgccattgacatctccaagtggaggaccttccagacagcactcttcctggaccggctcctggatgggtccccgctgccgcaggaggtggtgatgagcctgtccaagtgctactcctccctgctggactcgatgaacgctgagatccgcatccgctggctgcagattgtggtccgcaacgactactatcctgacctccacagggtgcggcgcttcctggagagccagatgtcacgcatgtacaccatcccgctgtacgaggacctctgcaccggtgccctcaagtccttcgcgctggaggtcttctaccagacgcagggccggctgcaccccaacctgcgcagagccatccagcagatcctgtcccagggcctgggctccagcacagagcccgcctcagagcccagcacggagctgggcaaggctgaagcagacacagactcggacgcacaggccctgctgcttggggacgaggcccccagcagtgccatctctctcagggacgtcaatgtgtctgcctagccctgttggcgggctgaccctcgacctcccagacaccacaattgtgccttctgtgggccaggcctgccatgactgcgtctcggctctggccatgagctctgcccaggcccacaagcccctcccctgggctctcccaggcagggagaatggggagagggacctccttgtgtctggcagagacctgtggacctggcctccccactcccagctctcttgcactgcaggccctggggccagcccgcacacaccatgcctcctgtctcaacactgacagctgtgcctagccccggatgccagcacctgccaggtgccgccccggggcaagggccccagcagccctatggtgaccgccacactgtgccttaatgtctgccgggggcccaggctgtgctgtccctgcagcacgcctccttgcagggatctgagccaccctccccgcacagccctgcaccccgcccctagggttggcagcctcagttggcccctggcagaggaacaaggacacagacattccctcagtgtggggggcaggggacacagggagaggatggttgtccctggggagggccctctggccccaggcaaccttagcccctcagaacagggagtcccaggacccagggagagtgtggggacaggacagcctgtctcttgtagcttcctggggtgggaggcacaggggcaaagcaataccccagggaaagtgggaggtggtgctggtgctctctccaggcccaccatgctgggagaggcggccagagcctggggcctccagcctgggactgctgtgatggggtatcacggtgatggtcccattaaacttccactctgcaaaaaaaaaaaaaaaaaaaaaaaaaaaaaaaaaaaaaaaaaaaaaaaaaaaaaaaaaaaaaaaaaaaaaaaaaaaaaaaaaaaaaaaaaaaaaaaaaaaaaaaaaaa

SEQ ID NO: 28085 - DNA, 4874 bp, Homo Sapiens
gagctctcgaggtgtctggaggctcagcgagcgccggacccaggaggcccaaggagctggaggtgaccctcaggcagcaagaaccccacggaagggcgtgagccctgcagacagctgtgcggcacctcgggctgggctcctgttaggaggaagtgcctgcacccaggcagcggctcagaggcagctgctccatgcagaactgaagctggttctgcagcagaaaggggagaggacacaggagcctggggtgcaggtgcctcccagcaacgccatggaggccaggagccggagtgccgaggagctgaggcgggcggagttggtggaaattatcgtggagacggaggcgcagaccggggtcagcggcatcaacgtagcgggcggcggcaaagagggaatcttcgttcgggagctgcgcgaggactcacccgccgccaggagcctcagcctgcaggaaggggaccagctgctgagtgcccgagtgttcttcgagaacttcaagtacgaggacgcactacgcctgctgcaatgcgccgagccttacaaagtctccttctgcctgaagcgcactgtgcccaccggggacctggctctgcggcccgggaccgtgtctggctacgagatcaagggcccgcgggccaaggtggccaagctgaacatccagagtctgtcccctgtgaagaagaagaagatggtgcctggggctctgggggtccccgctgacctggcccctgttgacgtcgagttctcctttcccaagttctcccgcctgcgtcggggcctcaaagccgaggctgtcaagggtcctgtcccggctgcccctgcccgccggcgcctccagctgcctcggctgcgtgtacgagaagtggccgaagaggctcaggcagcccggctggccgccgccgctcctccccccaggaaagccaaggtggaggctgaggtggctgcaggagctcgtttcacagcccctcaggtggagctggttgggccgcggctgccaggggcggaggtgggtgtcccccaggtctcagcccccaaggctgccccctcagcagaggcagctggtggctttgccctccacctgccaacccttgggctcggagccccggctccgcctgctgtggaggccccagccgtgggaatccaggtcccccaggtggagctgcctgccttgccctcactgcccactctgcccacacttccctgcctagagacccgggaaggggctgtgtcggtagtggtgcccaccctggatgtggcagcaccgactgtgggggtggacctggccttgccgggtgcagaggtggaggcccggggagaggcacctgaggtggccctgaagatgccccgccttagttttccccgatttggggctcgagcaaaggaagttgctgaggccaaggtagccaaggtcagccctgaggccagggtgaaaggtcccagacttcgaatgcccacctttgggctttccctcttggagccccggcccgctgctcctgaagttgtagagagcaagctgaagctgcccaccatcaagatgccctcccttggcatcggagtgtcagggcccgaggtcaaggtgcccaagggacctgaagtgaagctccccaaggctcctgaggtcaagcttccaaaagtgcccgaggcagcccttccagaggttcgactcccagaggtggagctccccaaggtgtcagagatgaaactcccaaaggtgccagagatggctgtgccggaggtgcggcttccagaggtagagctgcccaaagtgtcagagatgaaactcccaaaggtgccagagatggctgtgccggaggtgcggcttccagaggtacagctgctgaaagtgtcggagatgaaactcccaaaggtgccagagatggctgtgccggaggtgcggcttccagaggtacagctgccgaaagtgtcagagatgaaactcccagaggtgtcagaggtggctgtgccagaggtgcggcttccagaggtgcagctgccgaaagtgccagagatgaaagtccctgagatgaagcttccaaaggtgcctgagatgaaacttcctgagatgaaactccctgaagtgcaactcccgaaggtgcccgagatggccgtgcccgatgtgcacctcccagaagtgcagcttccaaaagtcccagagatgaagctccctgagatgaaactccctgaggtgaaactcccgaaggtgcccgagatggctgtgcccgatgtgcacctcccggaagtgcagctcccgaaagtcccagagatgaaactccctaaaatgcctgagatggctgtgccagaggttcgactccccgaggtgcagctgccaaaagtctcagagatgaaactccccaaggtgcctgaaatggccgtgcccgatgtgcacctcccagaggtgcagctgcccaaagtctgtgaaatgaaagtccctgacatgaagctcccagagataaaactccccaaggtgcctgagatggctgtgcccgatgtgcacctccccgaggtgcagctgccgaaagtgtcagagattcggctgccggaaatgcaagtgccgaaggttcccgacgtgcatcttccgaaggcaccagaggtgaagctgcccagggctccggaggtgcagctaaaggccaccaaggcagaacaggcagaagggatggaatttggcttcaagatgcccaagatgaccatgcccaagctagggagggcagagtccccatcacgtggcaagccaggcgaggcgggtgctgaggtctcagggaagctggtaacacttccctgtctgcagccagaggtggatggtgaggctcatgtgggtgtcccctctctcactctgccttcagtggagctagacctgccaggagcacttggcctgcaggggcaggtcccagccgctaaaatgggcaagggagagcgggtggagggccctgaggtggcagcaggggtcagggaagtgggcttccgagtgccctctgttgaaattgtcaccccacagctgcccgccgtggaaattgaggaagggcggctggagatgatagagacaaaagtcaagccctcttccaagttctccttacctaagtttggactctcggggccaaaggtggctaaggcagaggctgagggggctgggcgagctaccaagctgaaggtatccaaatttgccatctcactccccaaggctcgggtgggggctgaggctgaggccaaaggggctggggaggcaggcctgctgcctgccctcgatctgtccatcccacagctcagcctggatgcccacctgccctcaggcaaggtagaggtggcaggggccgacctcaagttcaaggggcccaggtttgctctccccaagtttggggtcagaggccgggacactgaggcagcagaactagtgccaggggtggctgagttggagggcaagggctggggctgggatgggagggtgaagatgcccaagctgaagatgccttcctttgggctggctcgagggaaggaagcagaagttcaaggtgatcgtgccagcccgggggaaaaggctgagtccaccgctgtgcagcttaagatccccgaggtggagctggtcacgctgggcgcccaggaggaagggagggcagagggggctgtggccgtcagtggaatgcagctgtcaggcctgaaggtgtccacagccaggcaggtggtcactgagggccatgacgcggggctgaggatgcctccgctgggcatctccctgccacaggtggagctgaccggctttggggaggcaggtaccccagggcagcaggctcagagtacagtcccttcagcagagggcacagcaggctacagggttcaggtgccccaggtgaccctgtctctgcctggagcccaggttgcaggtggtgagctgctggtgggtgagggtgtctttaagatgcccaccgtgacagtgccccagcttgagctggacgtggggctaagccgagaggcacaggcgggcgaggcggccacaggcgagggtgggctgaggctgaagttgcccacactgggggccagagctagggtggggggcgagggtgctgaggagcagcccccaggggccgagcgtaccttctgcctctcactgcccgacgtggagctctcgccatccgggggcaaccatgccgagtaccaggtggcagagggggagggagaggccggacacaagctcaaggtacggctgccccggtttggcctggtgcgggccaaggagggggccgaggagggtgagaaggccaagagccccaaactcaggctgccccgagtgggcttcagccaaagtgagatggtcactggggaagggtcccccagccccgaggaggaggaggaggaggaggaagagggcagtggggaaggggcctcgggtcgccggggccgggtccgggtccgcttgccacgtgtaggcctggcggccccttctaaagcctctcgggggcaggagggcgatgcagcccccaagtcccccgtcagagagaagtcacccaagttccgcttccccagggtgtccctaagccccaaggcccggagtgggagtggggaccaggaagagggtggattgcgggtgcggctgcccagcgtggggttttcagagacaggggctccaggcccggccaggatggagggggctcaggctgcggctgtctgaagcccctagtcagatggggatcccttcttgccttcctttctctaccccctcgctgttgtgtgtgtgataactagcactaaccctaagagggccgggaggtgggtgactgaccagggctggcagggaggcctgctcctgtctctctggcaggagtgcctgtaccccaccaagccatgtgaataaaataatctggaagtaaaaaaaaaaaaaaaaaaaa

SEQ ID NO: 28086 - DNA, 2948 bp, Homo Sapiens
gcgggtcccgggactgaggcagcagcgggggcggcggcgggcggaagctgaggtgacgaaggcagcggcggcggcggccgtttccctcacggtggcggagaccaaggcggcggcggcggacggggagcggcccggccccggccccctgctcgttggctgtggcagggccgccgtggggccggcccggctcccgccccccgcggctccccctccggctcctcctccggggagacgccgggggcctggcccggcccgcactcagactgctgctgcagccgccgccgggggagtcggaggcggtggcggcgccatgggcggcctggcctctgggggggatgtggagccgggactgcccgtcgaggtgcgcggctccaacggggccttctacaagggctttgtgaaggatgtccatgaagactctgtcaccatcttctttgaaaacaactggcagagtgagagacaaattccttttggggatgtccggctaccacctccagctgactataataaggagatcacagaaggggatgaagtggaggtttattctcgagccaatgaacaggaaccttgtggctggtggctggcccgggtgcggatgatgaagggagatttctatgtcattgaatatgctgcctgtgatgccacctacaatgaaattgttaccctggagcgacttcggccagttaatcccaatccccttgcaaccaaaggcagcttcttcaaggttaccatggctgtgcccgaggatctgagagaagcctgctccaatgaaaacgtccataaagagttcaagaaagccctgggagccaactgcatctttctcaacatcacaaacagtgagctcttcattctgtcaaccacagaagcccctgtgaagcgagcatctctgctgggtgatatgcatttccgaagcctgcgcaccaaactgctacttatgtcccgcaatgaagaagctaccaagcacctagagacaagcaagcagttggcagcagccttccaagaggagttcacagtgcgagaggacctgatgggactggcaattgggactcacggtgccaacatccagcaggcccgaaaagtacctggggtgaccgccattgagttgggtgaagagacctgcactttccgcatctatggggagactcccgaggcttgccgacaggcccgaagctaccttgagttttctgaggactcagtgcaagtgcccaggaacctggttggcaaagtgattggaaagaacgggaaagtgatccaggagattgtggataaatctggtgtggtgagggttcgagtggaaggtgataatgacaagaagaaccccagggaggagggaatggttcccttcatttttgttggcacccgagagaacatcagcaatgcccaggctttgctggagtatcacctctcctacctgcaggaggtagagcagcttcgcttggagaggctacaaattgatgagcagcttcggcagattgggctgggctttcgccctcctgggagtgggcggggcagcggtggcagcgacaaggctggatatagcactgatgagagctcctcctcctccctccatgcgactcgaacctatgggggcagctatgggggccgtggccgtggccggaggacaggcggtcctgcctatggccccagctcagatgtgtctacagcttcagagactgagtcagagaagagagaggagcccaaccgagctgggcctggcgacagggatcccccaacccgaggggaagaaagccggaggcggccgactgggggccggggtaggggacccccacctgccccccggcccacttcgagatacaattcttcatctattagctcagtgctgaaggatccagacagtaatccctacagcctattggacacgtctgaaccagagcccccggttgattcagaacctggggaaccccccccagcaagtgccaggcgccgccgctcccgccgccgccgcactgatgaagacaggaccgtcatggatggaggcctggaatcagatgggcccaacatgacagagaatggcctggaagatgaatcaagacctcaacgtcgtaatcgcagccgccgccgccgtaaccgtggtaatcggactgatggctctatcagtggagaccgccagccagtgactgtggctgactatatctcacgagcagagtctcagagccgccagaggccacccctggaacgcactaaaccctcagaagactctctttcaggacagaagggtgactctgtcagcaagcttcctaagggcccctcggagaatggggagctctccgcccccttggagttgggtagtatggtgaatggggtttcataaaacctccaacctgcacccctcccttctccatctcgcttgctgcccaacaccatggccctcacaggcccaactgacctgcgctggagctgctcttatctaggggggaggggggtggcacagcagcttgggtaccccccaacctccaggagctagtggaggggtgtgtaacagggtcataccccctccctcttgtccaccctacccccagggtaaggggagcctctctccttccccatcagactggatgtgcctttatcctctaatgccccaatctctctctgaacacccccattctccacctgttggtggggggtgctcctcgacccacccagatttgaccgttcagggggcctcccctgctatccctcctcccatcctgtaccccccatttctggggcctcatcactgtggaagacggggatagtaagagataagtgggtgggaggcacggggaaggttttggagtagaaccaggggtgtgtatgaaggggggtgacaaggtccccctggggaggggaccaaccttgtctggtggatgagaaggcgtatttatttttcactgtacagtatttaaaaagagaataaaaaaatccaaatggcaaaaaaaaaaaaaaaa

SEQ ID NO: 28087 - DNA, 2029 bp, Homo Sapiens
cggctggcagggtgtgcgtgagtttggtggcggccggctgtgcagagacgccatgtaccggctcatgtcagcagtgactgcccgggctgccgcccccgggggcttggcctcaagctgcggacgacgcggggtccatcagcgcgccgggctgccgcctctcggccacggctgggtcgggggcctcgggctggggctggggctggcgctcggggtgaagctggcaggtgggctgaggggcgcggccccggcgcagtcccccgcggcccccgaccctgaggcgtcgcctctggccgagccgccacaggagcagtccctcgccccgtggtctccgcagaccccggcgccgccctgctccaggtgcttcgccagagccatcgagagcagccgcgacctgctgcacaggatcaaggatgaggtgggcgcaccgggcatagtggttggagtttctgtagatggaaaagaagtctggtcagaaggtttaggttatgctgatgttgagaaccgtgtaccatgtaaaccagagacagttatgcgaattgctagcatcagcaaaagtctcaccatggttgctcttgccaaattgtgggaagcagggaaactggatcttgatattccagtacaacattatgttcccgaattcccagaaaaagaatatgaaggtgaaaaggtttctgtcacaacaagattactgatttcccatttaagtggaattcgtcattatgaaaaggacataaaaaaggtgaaagaagagaaagcttataaagccttgaagatgatgaaagagaatgttgcatttgagcaagaaaaagaaggcaaaagtaatgaaaagaatgattttactaaatttaaaacagagcaggagaatgaagccaaatgccggaattcaaaacctggcaagaaaaagaatgattttgaacaaggcgaattatatttgagagaaaagtttgaaaattcaattgaatccctaagattatttaaaaatgatcctttgttcttcaaacctggtagtcagtttttgtattcaacttttggctataccctactggcagccatagtagagagagcttcaggatgtaaatatttggactatatgcagaaaatattccatgacttggatatgctgacgactgtgcaggaagaaaacgagccagtgatttacaatagagcaagattttatgtttacaataaaaagaaacgtcttgtcaacacaccttacgtggataactcctataaatgggctggtggtggatttctgtctacagtgggtgaccttctgaaatttgggaatgcaatgctttatggttaccaagttgggctgtttaagaactcaaatgaaaatcttttacctggatacctcaaaccagaaacaatggttatgatgtggaccccagtccctaacacagagatgtcttgggataaagagggtaaatatgcaatggcgtggggtgttgtggaaaggaaacaaacgtatggttcgtgtagaaagcaacggcattatgcttcacatactggaggggcagtgggtgccagtagtgtcctgctggtccttcctgaagaactggatacagagactataaataacaaggttcccccaagaggaatcattgtttctatcatatgtaacatgcaatctgttggcctcaatagcaccgctttgaagattgcccttgaatttgataaagacagatcagactgataaccttaacaccataggtgcaaaatgagttgttctgaggtttttttgaaacattaaagttccaaaacatgacatttttaagaataaatttgaaatagagtataactgaatgcagagaattatgtacctctaattgcttaattttgtaatggtcttttattgtagaattggttctttatactcagggaagtaattatattgtttttactttttgaaaaaagtgttaactcttgaaataaaatattctgataaaataaaaaaaaaaaaaaaaaaaaaaaaaaaaaaaaaaaaaaaaaaaaaaaaaaaaaaaaaaaaaaaaaaaaaaaaaaaaag

SEQ ID NO: 28088 - DNA, 2134 bp, Homo Sapiens
ctcctttcttctctagaatccactgcaattccattctgcatctcctctggacactcccaggaccaccaggacaaccccatcacggccctgtcaccaggcccagtctggctccatgataaccaagacgcaggtccagagacaaccgccctgcacggtgcctgcatctgacccccttggtgggtagtgaccagcacaacatggaagaagccagggcagcaggcagccagctgccctgcagccccagatggcacctgggccttgggaagtcattcttcagatgagactcacccagacatgggagaaggaagaattcctgaatgcaacagactgggaaggacgcaccacaaaacgctccgcggtctctggacaccctatcagctagtcccgtccctcctggtgtccggtctcgaccatccatcccgtgttttgggagtgcctttccttaccagattcttctaaagccctgatgcacccacccttaagtggaaggttttgaaacatgaatctttcgctcgtcctggctgccttttgcttgggaatagcctccgctgttccaaaatttgaccaaaatttggatacaaagtggtaccagtggaaggcaacacacagaagattatatggcgcggttggtaacatctgaaactgtccagagggactctggagagaatggtcctcgctgttgggagttgatagccagagagtagcttctagacaccagaccttaccaggcaataacctaacagcacccattataggtgcaatatgggcatatatctccattgtgtcttggcttggagaacagctcccagagaagtatcaacccatccctggccatggtttctcttccatttctgcccgcaaatcggcttggtgaacatgggttgggtaagtagacataaagtccaccagctatatgtttgcctctagaatgaagaaggatggaggagagcagtgtgggaaaagaatatgaaaatgattgaactgcacaatggggaatacagccaagggaaacatggcttcacaatggccatgaatgcttttggtgacatgaccaatgaagaattcaggcagatgatgggttgctttcgaaaccagaaattcaggaaggggaaagtgttccgtgagcctctgtttcttgatcttcccaaatctgtggattggagaaagaaaggctacgtgacgccagtgaagaatcagaaacagtgtggttcttgttgggcttttagtgcgactggtgctcttgaaggacagatgttccggaaaactgggaaacttgtctcactgagcgagcagaatctggtggactgttcgcgtcctcaaggcaatcagggctgcaatggtggcttcatggctagggccttccagtatgtcaaggagaacggaggcctggactctgaggaatcctatccatatgtagcagtggatgaaatctgtaagtacagacctgagaattctgttgctaatgacactggcttcacagtggtcgcacctggaaaggagaaggccctgatgaaagcagtcgcaactgtggggcccatctccgttgctatggatgcaggccattcgtccttccagttctacaaatcaggcatttattttgaaccagactgcagcagcaaaaacctggatcatggtgttctggtggttggctacggctttgaaggagcaaattcgaataacagcaagtattggctcgtcaaaaacagctggggtccagaatggggctcgaatggctatgtaaaaatagccaaagacaagaacaaccactgtggaatcgccacagcagccagctaccccaatgtgtgagctgatggatggtgaggaggaaggacttaaggacagcatgtctggggaaattttatcttgaaactgaccaaacgcttattgtgtaagataaaccagttgaatcattgaggatccaagttgagattttaattctgtgacatttttacaagggtaaaatgttaccactactttaattattgttatacacagctttatgatatcaaagactcattgcttaattctaagacttttgaattttcattttttaaaaagatgtacaaaacagtttgaaataaattttaattcgtatataaaaaaaaaaaaaaaaaaaaaaaaaaaaaaaaaaaaa

SEQ ID NO: 28089 - DNA, 3866 bp, Homo Sapiens
ctctaatattggtgaatgaactttgctaagtatggattcaggcggtggaagtcttggattgcacacgccagactctagaatggcccataccatgattatgcaagattttgtggctggaatggctggtactgcacatatcgatggagaccatattgttgtttcagttcctgaagctgttttagtttctgatgttgtcacagatgatgggataactcttgatcatggccttgcagctgaagttgtccatggacctgatatcatcacagagactgatgtagtaacagaaggtgtgattgttcctgaagcggtacttgaagctgatgttgccattgaagaggatttagaggaagatgatggtgatcacatcttgacttctgaactaattacagaaaccgttagggtaccagagcaggttttcgtggctgaccttgttactggtcctaatggacacttagaacatgtggtccaagattgtgtttcaggagtcgactctcccacaatggtatcagaggaggttcttgtaactaattcagatacagaaactgtgattcaagcagctggaggtgttcctggttctacagttactataaaaaccgaagatgatgatgatgatgatgtcaagagcacttctgaagactacttaatgatatctttggatgatgttggagaaaaattagagcatatggggaatacaccattaaaaattggcagtgatggttcacaagaagatgctaaagaagatgggtttggttctgaagttataaaagtgtatatatttaaagcggaggctgaagatgatgttgaaataggtggaacagaaattgtcacagagagtgagtacaccagtggacattcagtagctggagtgcttgaccagagccgaatgcagcgggagaagatggtttacatggcagttaaagattcttctcaagaagaagatgatatcagagatgaaagaagagtttcccgaaggtatgaagattgtcaagcatcaggaaatactttggactcagcattagaaagcagaagtagtacagcagcacagtaccttcaaatttgtgacggcattaatacaaataaagtacttaaacaaaaagccaaaaagaggagaaggggagaaaccaggcagtggcaaacagctgttataataggtcctgatggacagcccctcacagtgtacccttgccatatttgcacaaaaaagtttaaatccaggggattcttaaaaagacacatgaagaatcatcctgatcatttaatgagaaaaaaatatcagtgtacagattgtgactttacaactaacaagaaagtgagtttccataaccacttagaaagccataagctcataaacaaagtcgacaaaacccatgaatttacagaatacacacgaagatacagagaggctagtccactgagttccaataaacttattttaagagacaaggagccgaagatgcacaagtgcaaatactgtgactatgaaactgcagaacaaggactgttaaacaggcatttgttggccgttcacagcaagaattttcctcatgtttgtgttgagtgtgggaagggttttcgacatccttctgaactcaagaaacatatgagaacccatactggtgagaagccatatcagtgtcagtattgtattttcaggtgtgcagatcaatcaaatctgaaaactcacattaagtctaaacatggtaacaatttgccatataaatgtgagcattgtccccaagcatttggtgatgagagggagcttcaacgccatctggatttgtttcaaggacataagacacaccagtgtcctcattgtgaccataagagcaccaattcaagtgaccttaagcggcacatcatatctgtccatactaaggattttcctcacaaatgtgaggtctgtgataaaggttttcatcgtccttctgagctcaaaaagcatagtgatatccataagggtaggaagattcatcagtgcaggcactgtgactttaaaacatccgatccatttattcttagtggccatatcctttcagttcatactaaagatcagccattgaaatgtaaaaggtgcaagagaggattcagacaacaaaatgagctaaaaaaacatatgaagacccatactggaaggaagatttaccaatgtgagtattgtgaatacagcactacagatgcatctggctttaaacgacatgtgatatcaatacatacaaaagactatccacacaggtgtgaattctgcaagaagggattccgaagaccatcagaaaaaaatcagcatattatgaggcaccacaaagaggctcttatgtaataagatcaatataaagaaagaagctatttaggagatatgatatgctacttgggagaaaactctcactaactgtctcaccgggtttcaaagcttgatactaaaccatgactttacattctttgtattaaagatcttaaaatatttgaattcacaggggatcccatagccctttgaaaattacttaaagaatttaagaagcactatagaatggttacagaaaaacttcttaagtatctgtgtaatagtattatatgcatacttaaactacagaggggaaaagcaaagacaaatactttatttggctgattatgttagatacaaatgtttctgagaagagaatacataattgagtttagtgatgctttgctatagcaagcaaacccacttttatgcaattttagaaatggggcagggaaacaaaatgtggtcattcatcagtcacttagtcattgagccttttatattgtacctggaaattaaattccagcaatgacaaaagttttgtgtattcattaaaagaaaactaactggaaaacaggttagattaattcagtactattaaaaaagaattcagagctgttaatattttatcacaggataggatacttaaaatatagcattctgtgctgagatctaaggtgaagtctataaagattaaagttcccttttttctgatgttcaagttgattgttgttcagtatggcatatatgacaaaagtatatttgagtcaaatgtggctttctaaaatggatgcaacattagcgttgcaaacaaaatcagcactatatttcttaatgatctaaagattaatttgagagaacacagttttcttaaatattataatgtctagagtttttttaggacagtcttagcaagtatgattgttctagtcttacttgctctaatgtttaaaggtgcaattttatgccattattgaaattgatttttaaaatctatataccatatgattaacatgcattttcaatatgaggcagtgtttatgcagtatttaacagagcaatctgctgccaatagagtttggaggtggatatttagtttacagtgtataaacttaaaatatgcatccctttaacaacgctttgtgttagcatgctgcaaatcaaaatggcacttaatattaaaagctggtttagggaaattttatgaaaatcctgttcataaatgtaatgcatatgatatgtacttttaagttttagttgcttcatgtttacattcagctgttcaacataattaaaatgtaattttacttcatgctatattgtggctttgtgtttcaaataatgttcacctttctgtttttgcaccagataagaatcagttccttgagaataaattttttatctttcttaacttcagaatattaaatttggaatatctactaaaattgtgtgttatgtggctgtaaatgatgtacacgctgtaaaataagatcgctactgttatgtgggattattatttctaaatgttactcattgaaatgagcatacaataaaaagcatttattgcacttaaaaaaaaaaaaaaaaa

SEQ ID NO: 28090 - DNA, 1515 bp, Homo Sapiens
tatggggctagaagcactggtgcccctggccgtgatagtggccatcttcctgctcctggtggacctgatgcaccggcgccaacgctgggctgcacgctacccaccaggccccctgccactgcccgggctgggcaacctgctgcatgtggacttccagaacacaccatactgcttcgaccagttgcggcgccgcttcggggacgtgttcagcctgcagctggcctggacgccggtggtcgtgctcaatgggctggcggccgtgcgcgaggcgctggtgacccacggcgaggacaccgccgaccgcccgcctgtgcccatcacccagatcctgggtttcgggccgcgttcccaaggggtgttcctggcgcgctatgggcccgcgtggcgcgagcagaggcgcttctccgtctccaccttgcgcaacttgggcctgggcaagaagtcgctggagcagtgggtgaccgaggaggccgcctgcctttgtgccgccttcgccaaccactccggacgcccctttcgccccaacggtctcttggacaaagccgtgagcaacgtgatcgcctccctcacctgcgggcgccgcttcgagtacgacgaccctcgcttcctcaggctgctggacctagctcaggagggactgaaggaggagtcgggctttctgcgcgaggtgctgaatgctgtccccgtcctcctgcatatcccagcgctggctggcaaggtcctacgcttccaaaaggctttcctgacccagctggatgagctgctaactgagcacaggatgacctgggacccagcccagcccccccgagacctgactgaggccttcctggcagagatggagaaggccaaggggaaccctgagagcagcttcaatgatgagaacctgtgcatagtggtggctgacctgttctctgccgggatggtgaccacctcgaccacgctggcctggggcctcctgctcatgatcctacatccggatgtgcagcgccgtgtccaacaggagatcgacgacgtgatagggcaggtgcggcgaccagagatgggtgaccaggctcacatgccctacaccactgccgtgattcatgaggtgcagcgctttggggacatcgtccccctgggtgtgacccatatgacatcccgtgacatcgaagtacagggcttccgcatccctaagggaacgacactcatcaccaacctgtcatcggtgctgaaggatgaggccgtctgggagaagcccttccgcttccaccccgaacacttcctggatgcccagggccactttgtgaagccggaggccttcctgcctttctcagcaggccgccgtgcatgcctcggggagcccctggcccgcatggagctcttcctcttcttcacctccctgctgcagcacttcagcttctcggtgcccactggacagccccggcccagccaccatggtgtctttgctttcctggtgaccccatccccctatgagctttgtgctgtgccccgctagaatggggtacctagtcccca

SEQ ID NO: 28091 - DNA, 1806 bp, Homo Sapiens
aggggcagaggaaacactttccacctcttggatatggattttatcctgccctgattcaggagatccccatctgttaagtaaggggaaagatgattttgttgtcttttgtttcagattctaatgtaggaactggtgagaagaaggtgactgaagcctggatttctgaggatgaaaactcacataggacgacgtcagacagactcacggtgatggagctcccctctcccgagtctgaggaagtccacgagcccagattaggggagctcttgggaaatccagaaggtcagagcctggggagttccccctctcaggacaggggctgcaagcaggtgacagtgacccattggaagatccagacaggagagacagctcaagtgtgcaccaagtcaggaagaaaccatattctgaactcagaccttcttctgcttcagagagagctcatagagggggaagccaatccttgcgatatctgtggcaaaaccttcacgtttaattcagacctagttaggcatcggatttcgcatgctggggagaaaccttacacgtgcgatcagtgtgggaaaggctttggccagagctcacaccttatggagcatcagagaattcacactggagagagactctacgtctgtaatgtgtgtgggaaagacttcattcactattcaggtctcattgagcatcagcgcgttcattcaggagaaaagcccttcaaatgtgcgcagtgtgggaaggcgttttgtcacagttcagacctgattaggcaccagagagttcacaccagagagagaccttttgaatgcaaagagtgtgggaaaggcttcagtcagagctccttacttattcgccatcagaggattcacacgggagaaaggccctatgagtgcaatgaatgtgggaaatccttcataaggagctcgagcctcattcgccattatcagatccacacagaagtgaaacagtatgaatgcaaagaatgtgggaaggcattccgtcatcgctcagaccttattgaacaccagagaattcacaccggagagagaccctttgaatgcaatgagtgtgggaaagcctttattcggagttcaaagctcattcagcatcagaggatccatactggggagaggccttacgtatgcaatgagtgtgggaagcgcttcagccagacgtcaaacttcacccagcatcagagaattcacactggagagaaactctatgaatgtaacgagtgtgggaaagctttctttctgagttcataccttattcgacaccagaaaatccacactggagagagagtgtatgaatgtaaggaatgtgggaaagcgtttctccagaaagcccatctcactgagcaccagaagatccactctggggacaggcccttcgaatgtaaagactgtgggaaagccttcatccagagctccaagctgcttctgcaccagattattcacactggagaaaagccctatgtgtgcagttattgtgggaaaggctttattcagaggtcaaacttccttcaacaccagaaaattcatactgaagagaagctctatgaatgtagtcagtatgggagagattttaactcaactacaaacgttaaaaataatcaaagggttcaccaagagggactctccttgagtaaggcccccatacatttgggtgagaggtctgtagataagggggaacacacaggtaacttataaaataattactttcccgcccagtgagtgatgtttggaaatgcgtggaattaggattcatgtggtttctaagatttggacacgtcagaattttgtgagtcatggatgg

SEQ ID NO: 28092 - DNA, 1806 bp, Homo Sapiens
aggggcagaggaaacactttccacctcttggatatggattttatcctgccctgattcaggagatccccatctattaagtaaggggaaagatgattttgttgtcttttgtttcagattctaatgtaggaactggtgagaagaaggtgactgaagcctggatttctgaggatgaaaactcacataggacgacgtcagacagactcacggtgatggagctcccctctcccgagtctgaggaagtccacgagcccagattaggggagctcttgggaaatccagaaggtcagagcctggggagttccccctctcaggacaggggctgcaagcaggtgacagtgacccattggaagatccagacaggagagacagctcaagtgtgcaccaagtcaggaagaaaccatattctgaactcagaccttcttctgcttcagagagagctcatagagggggaagccaatccttgcgatatctgtggcaaaaccttcacgtttaattcggacctagttaggcatcggatttcgcatgctggggagaaaccttacacgtgcgatcagtgtgggaaaggctttggccagagctcacaccttatggagcatcagagaattcacactggagagagactctacgtctgtaatgtgtgtgggaaagacttcattcactattcaggtctcattgagcatcagcgcgttcattcaggagaaaagcccttcaaatgtgcacagtgtgggaaggcgttttgtcacagttcagacctgattaggcaccagagagttcacaccagagagagaccttttgaatgcaaagagtgtgggaaaggcttcagtcagagctccttacttattcgccatcagaggattcacacgggagaaaggccctatgagtgcaatgaatgtgggaaatccttcataaggagctcgagcctcattcgccattatcagatccacacagaagtgaaacagtatgaatgcaaagaatgtgggaaggcattccgtcatcgctcagaccttattgaacaccagagaattcacaccggagagagaccctttgaatgcaatgagtgtgggaaagcctttattcggagttcaaagctcattcagcatcagaggatccatactggggagaggccttacgtatgcaatgagtgtgggaagcgcttcagccagacgtcaaacttcacccagcatcagagaattcacactggagagaaactctatgaatgtaacgagtgtgggaaagctttctttctgagttcataccttattcgacaccagaaaatccacactggagagagagtgtatgaatgtaaggaatgtgggaaagcgtttctccagaaagcccatctcactgagcaccagaagatccactctggggacaggcccttcgaatgtaaagactgtgggaaagccttcatccagagctccaagctgcttctgcaccagattattcacactggagaaaagccctatgtgtgcagttattgtgggaaaggctttattcagaggtcaaacttccttcaacaccagaaaattcatactgaagagaagctctatgaatgtagtcagtatgggagagattttaactcaactacaaacgttaaaaataatcaaagggttcaccaagagggactctccttgagtaaggcccccatacatttgggtgagaggtctgtagataagggggaacacacaggtaacttataaaataattactttcccgcccagtgagtgatgtttggaaatgcgtggaattaggattcatgtggtttctaagatttggacatgtcagaattttgtgagtcatggatgg

SEQ ID NO: 28093 - DNA, 2397 bp, Homo Sapiens
tcgtgagtccccccgcctcgcatgatggctgcggtgccgccgggcctggagccgtggaaccgtgtgagaatccctaaggcggggaaccgcagcgcagtgacagtgcagaaccccggcgcggccattgacctttgcattgcagctgtaattaaagaatgccatctcgtcatactgtcgctgaagagccaaaccttagatgcagaaacagatgtgttatgtgcagtcctttacagcaatcacaacagaatgggccgccacaaaccccatttggccctcaaacaggttgagcaatgtttaaagcgtttgaaaaacatgaatttggagggctcaattcaagacctgtttgagttgttttcttccaatgaaaatcagcccttaactaccaaagtatgtgttgtccccagtcagccagtggtggagttggtgttgatgaaggttttgggagcctgcaagttgttgctccgcttgttggactgctgctgcaaaacttttcttttgactgtgaaacatctaggtttgcaagagttcattattttaaaccttgtgatggttgggctggtgagcaggttatgggttctctataaaggtgtcttaaaaaggttgattttgttatatgagcctttgtttggattgcttcaagaggtcgctaggattcaaccaatgccttacttcaaagattttacctttccttctgatatcactgaatttttaggacagccatattttgaagcctttaagaaaaaaatgcctatagcttttgcagctaaaggaataaataaattgctaaataaactgtttttaataaatgagcagtcaccaagagccagtgaagaaaccttgcttggaatttcaaaaaaagctaaacaaatgaagatcaatgtacagaataatgtggatcttggacagccagtaaagaataagagagtcttcaaagaagagtcatcagaatttgatgtgagggctttctgcaaccagctgaaacacaaagctactcaggagaccagttttgattttaaatgttctcaatccagactaaagacaaccaagtattcttctcagaaagtgataggaactcctcatgccaaaagtattgtgcaaagattccgagaggctgagtccttcacacaactttctgaagaaatccagatggcagttgtatggtgcaggagcaaaaaactcaaggctcaggccatttttctgggtaacaaacttcttaaaagcaaccggcttaaacatctggaagctcaaggtactagtttgccaaagaaactagagtgcataaaaacgtctatttgcaaccaccttcttcgtggctcaggtatcaaaacttcaaagcatcatctgagacagagaagatcacagaataaatttttacggagacaaaggaaaccacagagaaagttgcagtcgactcttttaagggaaattcagcagttctctcaagggactcggaagagtgctacagataccagtgctaagtggagactctcacactgtactgtgcatagaactgatctctaccctaacagtaagcagctcttgaataatggagtttcaatgcctgtcatacaaactaaggggaaaatgattcatgaaaatcttagaggcatccatgaaaatgaaactgattcgtggacggtgatgcaaataaataaaaacagtacatcaggaaccattaaggagacagatgacattgatgatatttttgctttaatgggagtttagatgttcgttcatatgtgagacttttaagtgattaacaaggctagttcagtgttctaagtagaactgctaagatctggaagtaccacctggactcacagaggagctgctttagtgcagcattgcacaggagttcatttcagttcagtctacatttaaagtagcattgtgtcatttcatcaacaagtatttcttttttggcttcaactacatgtcaggtgttaatatgaaaaatctgccacagcctacccttgagaagcagatgtaattccttgagtgaggctagtaagtctctgaaaaactgaataattttatgacttactaggcaatttaataatcgtttgcaaaaaccattgtgtcttgaggtaaatgaggagcgggggtgggagatagcaaggaaacacctgaaaggtcaatttggtcttattggctccattatacataggtccgcctctgaatactaaagtttgtagctcctgacatttatgttttcttgtttatatgttggaattgatcaacaaggtttgccactgcttgtattaccagggactggttacaaccattatttctcttcatttgcttggcttatctcatattaaagtgagtttggagttctccaaaaaaaaaaaaaaaaaaaaaaaaaaaaaaaaaaaaaaaagaaaaaaaaaaaaaaaa

SEQ ID NO: 28094 - DNA, 1117 bp, Homo Sapiens
gggcgcgcacactcgcgagccccggcgacatgcaaatgagctggctccagtgcccagacccaagccccccactgctcaatggacacccccagcccagacccgttgccttcgcctttgcccggggaggaagagaaacctctggccttatctcctcctgttccccggggccgccgaggccgtcgtcctgggggagccacctcctcaaatcggacactcaaggcctccctccatcgcaagcggggccgcccccccaagtcagggcaggagcccccactggtgcaggtgcagggggtgacagccccagtaggcagcagtggcgggagcgacctcctcctgatcgatgatcagggtgtgccctatacggtctctgaaggttcagcggctgggcctgagggctctggccccaggaaggccccacacttctgcccggtgtgcctgcgggccttcccctacctctccgacctggagcgccacagcatctcgcactcagagctgaagccgcaccagtgcaaggtttgcggcaagaccttcaagcgctccagccacctgcggcggcactgcaacatccatgccggcctgcggcccttccgctgcccgctgtgcacccgccgcttccgcgaggcgggcgagctggcgcaccaccatcgcgtgcactcgggggagcgcccgtaccagtgccccatctgccggctgcgctttacagaggccaacacgctccggcgccatgcgaagcgcaagcacccggaggccatgggggtacccctgtgtgcaccagatccagggtctgaaccgccgtgggacgaggagggcatcccggccacagcaggggccgaggaagaggaggagacagaggggaaaggggagccggcctgacccacacccccggccatcgctccctgggccaggtttagagcagggagtttggctggtgctgggcctgagccagggggccgggacacccttgtttccggtggtcttcccgttgtgggagcaggtggagggtggagacctaaactttggggtccagctgccttcagcccccctcccccagactaacagacccttggaggcaggggctgtggaaataaatctctgcctgctgaaaaaaaaaaaaaaa

SEQ ID NO: 28095 - DNA, 2081 bp, Homo Sapiens
ggtcactcggttcaaggcagcgcgactgcgggtggcgcacgaccagggcgcagaccttggggcgcgcggcccatggagtcggggctgctgcggccggcgccggtgagcgaggtcatcgtcctgcattacaactacaccggcaaactccgcggtgcgcgctaccagccgggtgccggcctgcgcgccgacgccgtggtgtgcctggcggtgtgcgccttcatcgtgctagagaatctagccgtgttgttggtgctcggacgccacccgcgcttccacgctcccatgttcctgctcctgggcagcctcacgttgtcggatctgctggcaggcgccgcctacgccgccaacatcctactgtcggggccgctcacgctgaaactgtcccccgcgctctggttcgcacgggagggaggcgtcttcgtggcactcactgcgtccgtgctgagcctcctggccatcgcgctggagcgcagcctcaccatggcgcgcagggggcccgcgcccgtctccagtcgggggcgcacgctggcgatggcagccgcggcctggggcgtgtcgctgctcctcgggctcctgccagcgctgggctggaattgcctgggtcgcctggacgcttgctccactgtcttgccgctctacgccaaggcctacgtgctcttctgcgtgctcgccttcgtgggcatcctggccgcgatctgtgcactctacgcgctcgctggccttgctgcgcacgctcagcgtggtgctcctggcctttgtggcatgttggggccccctcatcctgctgctgttgctcgacgtggcgtgcccggcgcgcacctgtcctgtactcctgcaggccgatcccttcctgggactggccatggccaactcacttctgaaccccatcatctacacgctcaccaaccgcgacctgcgccacgcgctcctgcgcctggtctgctgcggacgccactcctgcggcagagacccgagtggctcccagcagtcggcgagcgcggctgaggcttccgggggcctgcgccgctgcctgcccccgggccttgatgggagcttcagcggctcgtagcgctcatcgccccagcgcgacgggctggacaccagcggctccacaggcagccccggtgcacccacagccgcccggactctggtatcagaaccggctgcagactgacaccctcggcccacggctgtcttcccaagttttacagacttgttctttttacataaaggaatttgtaggaaatgcagccaaaggtgcagtcggaaaagatgcaggggaaatgtatttatgcagcgacaccccacaatgtgaacaaacagacaaaaaatctgtgccctcgtggaattgacgttctgcttgggaacacagaaaagaactcggtgatgaaataatggagatgattccagtgacaaacgacagagatggtgatggtggtcagggaagacctctctgcagaggtagtgacttgtgatgtgagctgagacctctgtcctgggaagaccaaaagaaaagcatttcaggatgagggaatggcatgcgcaaaggccctgaggctgaaatgtgcccatgtgttctaagaaatgcagcgatgctggtgtgcctggagcagggacggagggggagaatgggaggagacaaggagctgaaggagtagttcccgaaggaccttgtgggtgatatagaggacttcgcttttgctctgagtgaggtgggagccatagaagcttctaagcagaagagggacttgccctaattcaggtgatcacaggtgtcttgtggcctccatgggaggttgaaaaccagagaaggtgaagggggggctgcactgagccacaggaacaatgatggagattccagctaagcccagaccccgtggattctagatagattttagaggcagcagacagaattactgaggaattgagtgtaagagtggaataaagttatcaaggacaatgccaagggtggggcacccccaaatttgactctgggagactcagccaaatcctatctggtaataaaatttcttttttatttttcaaaaaaaaaaaaaaaaaaaagaaaaaaaaaaaaaaaa

SEQ ID NO: 28096 - DNA, 2469 bp, Homo Sapiens
ctttctgggctcggacctaggtcgcggcgacatggccaaacgtaccaagaaagtcgggatcgtcggtaaatacgggacccgctatggggcctccctccggaaaatggtgaagaaaattgaaatcagccagcacgccaagtacacttgctctttctgtggcaaaaccaagatgaagagacgagctgtggggatctggcactgtggttcctgcatgaagacagtggctggcggtgcctggacgtacaataccacttccgctgtcacggtaaagtccgccatcagaagactgaaggagttgaaagaccagtagacgctcctctactctttgagacatcactggcctataataaatgggttaatttatgtaacaaaattgccttggcttgttaactttattagacattctgatgtttgcattgtgtaaatactgttgtattggaaaagcatgccaagatggattattgtaattcagtgtcttttttagtagtcaaatggtaaaatgcagcataagaatataagtcttccaagttagatatgagtgttagctttttataagtctgctcctgccagtttgactttgagatacattggagccaactgtaaactttagtttttaaattacagttagtttttttgtttgtttttgaggcggagtctctgttacccaggctggagtgcagtataccagtcttggcccgcttcaacctccacttcttgggttcaagcgattctcctgcctcagcctcctgagtagctgggattgcaggcacgcaccaccatacctggctaatttttgtattttgagtagagatggagttttcaccacattggccaggctgttcttgaactgacctcaagcgatccacctgccttggccttccagagtgctgggattgcaggtgtgggccaccacgcccagccttgcatttaatatttttataatgtgtctaggctgggtgcggtgactcacgcctgggatcccagcactttgggtggctgaggcaggtggattacttgaggccaggagattgaggccagtgtggccaacatagcaaaaacccgtctcgacgaaaaatacagaagatagcttggtgtggtggcacgtgcctgtgatcccagctactttggaggctcaggcacaagaatcacttgaacctacgaggcggaggttgcagtgagccaggatcgtgccactgcactttatttagccaggacaacactctgtctccaaaaaaagtttctgaaggtaaaagatatactaaaggatatacatatactgcctcttctatgatgtttcatttgacctacaccatcagcatcttcaggaaacagtatgaaactaatttcacattaaatgttgcaaacgtctgcaattctccagtttttagtttgcacgtaaggattcgtaggattgatttcagattgacagatggttgtagtaacaaaaaaatgaattgccttggagcattcgagttattttaggcctgcctttgacacttttatgcacttaattcactgccaatttagtctaactcctcaaccatctgtggtatggacttctcagtcctcctaattggtatgtcttttatctatcccagagtcagtagtcctttaaggatgcaaatttaattcgataagaatgtggatttacttcatctttaggacagagtaaaaacctttatttcacttggtctgacccctatcttctataacttgtttttttgctcattactggcctttgcacggatgtctcccttcacctgtacctcctgcattgcctctggcagaaacatcgctaccccaggagaatacttcactgggtcaggcatttgctagatccatagcagtaactcatctgtggatctcatttgtgtcacaaaatggtactcatactgattttgtaatgtgaagcaagtactgtgggtcagtaggggtaggaccaggagtgacaagtcaggattttcaggcttcataggaatgacacagctctccaggtgaatctcctggagaattctccataggatctccaggtgagtgaccaggatttcatgtaagcatagggaattgaatgagcattagatggtctaatgctgcggttaagaacaccaacttagccaaactgcctagatagttgggtgacttgggttaagtgacttaacctctctgcttcagtttcctgtataattcttggtagtagaatggagtatatgctgggtgtttggattattaatttggagtcttacaaagctgctatgttacatgattaggcatggaaaacttcggtttttataatcagtgaagtactgctttttgtttgttttctgagagagtgtctgtcacccaggctgaagtgcagtggcatgatctcagttcactgcagcctctacctcccgggttcaagcagttctcgtgcctcagcctccgaagtagctgggattacaggcttatgccacaaaaaaaaaaaaaaaa

SEQ ID NO: 28097 - DNA, 1541 bp, Homo Sapiens
aatgggcttgggcggctcctcggcgggtggcggtggtggccgtagcggttcctcctggccctgttaatgtcggggccaggccgggggaggatggcgccctagaacccggccttgctggggtaggggcgggaggggacggggtggggaccggccatgtcggaggtgacccggagtctgctgcagcgctggggcgccagttttaggagaggcgccgacttcgactcttggggccagctggtggaggcgatagacgagtatcagatattagcaagacatctacaaaaggaggcccaagctcaacacaataattctgaattcacagaagaacaaaagaaaaccataggcaaaattgcaacatgcttggaattgcgaagtgcagctttacagtccacacagtctcaagaagaatttaaactggaggacctgaagaagctagaaccaatcctaaagaatattcttacatataataaagaattcccatttgatgttcagcctgtcccattaagaagaattttggcacctggtgaagaagagaatttggaatttgaagaagatgaagaagagggtggtgctggagcagggtctcctgattcttttcctgctagagttcccggtactttattaccaaggttgccatcggaaccaggaatgacattactcactatcagaattgagaaaattggtttgaaagatgctgggcagtgcatcgatccctatattacagttagtgtaaaggatctgaatggcatagacttaactcctgtgcaagatactcctgtggcttcaagaaaagaagatacatatgttcattttaatgtggacattgagctccagaagcatgttgaaaaattaaccaaaggtgcagctatcttctttgaattcaaacactacaagcctaaaaaaaggtttaccagcaccaagtgttttgctttcatggagatggatgaaattaaacctgggccaattgtaatagaactatacaagaaacccactgactttaaaagaaagaaattgcaattattgaccaagaaaccactttatcttcatctacatcaaactttgcacaaggaatgatcctgacatgatgaacctggaacttctgtgaattttaccactcagtagaaaccatcatagctctgtgtagcatattcacccttcaacaggcaggaagcaagccgtacccagaccagtaggccggacggagtccaatgcaaagctgtaccacagaattcagagtccagcacatcacactgacgtataggactccttgggatacaggctatgtggttcatctgcaagttctttcaaattattgcaaagctccaaaaaatttcccaaaatattttttgaaaaaaatctgcatagaagtggacctgcacagaccaaacttgtgttgttcaagggtcagctgtatttgggagaggaatcccacagaactttaattgaaagataagggcttacacttcagagtaaaaaattaaagagaaacaaaacaataaaggaaaataataaatgccttctgttcaaaaaaaaaaaaaaaa

SEQ ID NO: 28098 - DNA, 1587 bp, Homo Sapiens
gggttcctccggccgggctgcggggctccgctcagtccgggagcgcagctgggccgcggcgctccgacctccgctttcccaccgcccgcagctgaagcacatcccgcagcccggcgcggactccgatcgccgcagttgccctctggcgccatgtcgcagaacggagcgcccgggatgcaggaggagagcctgcagggctcctgggtagaactgcacttcagcaataatgggaacgggggcagcgttccagcctcggtttctatttataatggagacatggaaaaaatactgctggacgcacagcatgagtctggacggagtagctccaagagctctcactgtgacagcccacctcgctcgcagacaccacaagataccaacagagcttctgaaacagatacccatagcattggagagaaaaacagctcacagtctgaggaagatgatattgaaagaaggaaagaagttgaaagcatcttgaagaaaaactcagattggatatgggattggtcaagtcggccggaaaatattccccccaaggagttcctctttaaacacccgaagcgcacggccaccctcagcatgaggaacacgagcgtcatgaagaaagggggcatattctctgcagaatttctgaaagttttccttccatctctgctgctctctcatttgctggccatcggactggggatctatattggaaggcgtctgacaacctccaccagcaccttttgatgaagaactggagtctgacttggttcgttagtggattacttctgagcttgcaacatagctcactgaagagctgttagatcctggggtggccacgtcacttgtgtttatttgttctgtaaatgctgcgttcctaatttagtaaaataaaagaatagacactaaaatcatgttgatctataattacacctatgggatcaataagcatgtcagactgattaatgtctactgtaaaaatttggtagtaaattttcatttgatattagatataaatatctgaatataaataattttaatatactagtcatgatgtgtgttgtattttaaaaattatctgcaaccttaattcagctgaagtactttatatttcaaaagaatgaataacattgataataaaatcgctactttaaggggtttgtccaaaataaatattgtggccttatatatcacactattgtagaaagtattatttaatttaaatggatgcaggttgtctactaaagaaagattatatataactatgctaattgttcataatcaacagaaaccaagatagagctacaaactcagctgtacagttcatacactaaactcttcttgcttttgcattataaggaattaagtctccgattattaggtgatcaccctggatgatcagttttctgctgaaggcacctactcagtatcttttcctctttatcactctgcattggtgaatttaatcctctcctttgtgttcaacttttgtgtgcttttaaaatcagctttattctaagcaaatctgtgtctactttaaaaaactggaaatggaaaaaaaaataaatctttgccaaatccttcaaaaaaaaaaaaaaa

SEQ ID NO: 28099 - DNA, 1584 bp, Homo Sapiens
atgaggccaagtgcgctgtgctcgaggggtgccggccaggcctgagcgagcgagctagccagcaggcatcgagggggcgcggctgccgtccggacgagacaggcgaacccgacgcagaagagtccaccaccggacagccaggtagccgccgcgtccctcgcacacgcagagtcgggcggcgcggggtctcccttgcgcccggcctccgccctctcctcctctcctttccccttcttctcgctgtcctctcctctctcgctgcccgcgtttgcgcagccccgggccatgtccgacgcgtccctccgcagcacatccacgatggagcgtcttgtcgcccgtgggaccttcccagtactagtgcgcaccagcgcctgccgcagcctcttcgggccggtggaccacgaggagctgagccgcgagctgcaggcccgcctggccgagctgaacgccgaggaccagaaccgctgggattacgacttccagcaggacatgccgctgcggggccctggacgcctgcagtggaccgaagtggacagcgactcggtgcccgcgttctaccgcgagacggtgcaggtggggcgctgccgcctgctgctggcgccgcggcccgtcgcggtcgcggtggctgtcagcccgcccctcgagccggccgctgagtccctcgacggcctcgaggaggcgccggagcagctgcctagtgtcccggtcccggccccggcgtccaccccgcccccagtcccggtcctggctccagccccggccccggctccggctccggtcgcggctccggtcgcggctccggtcgcggtcgcggtcctggccccggccccggccccggccccggctccggctccggccccggctccagtcgcggccccggccccagccccggccccggccccggccccggcccccgccccggccccggccccggacgcggcgcctcaagagagcgccgagcagggcgcgaaccaggggcagcgcggccaggagcctctcgctgaccagctgcactcggggatttcgggacgtcccgcggccggcaccgcggccgccagcgccaacggcgcggcgatcaagaagctgtccgggcctctgatctccgatttcttcgccaagcgcaagagatcagcgcctgagaagtcgtcgggcgatgtccccgcgccgtgtccctctccaagcgccgcccctggcgtgggctcggtggagcagaccccgcgcaagaggctgcggtgagccaaagcccaaagagccccgagggaacctgccggggcagcggacgttggaagggcgctgggcctcggctgggaccgttcatgtagcagcaaccggcggcggctgccgcagagcagcgttcggttttgtttttaaattttgaaaactgtgcaatgtattaataacgtctttttatatctaaatgtattctgcacgagaaggtacactggtcccaaggtgtaaagctttaagagtcatttatataaaatgtttaatctctgctgaaactcagtgcaaaaaaaagaaaaaagaaaaaaaaaaggaaaaaataaaaaaaccatgtatatttgtacaaaaaaaaaaaaaaaa

SEQ ID NO: 28100 - DNA, 2092 bp, Homo Sapiens
ggggcacgctgggacgcctcgctggcgggaggccacgggctttccacagcgcgggggaacgggaggctgcaggatggtcaagctgacggcggagctgatcgagcaggcggcgcagtacaccaacgcggtgcgcgaccgggagctggacctccgggggtataaaattcccgtcattgaaaatctaggtgctacgttagaccagtttgatgctattgatttttctgacaatgagatcaggaaactggatggttttcctttgttgagaagactgaaaacattgttagtgaacaacaacagaatatgccgtataggtgagggacttgatcaggctctgccctgtctgacagaactcattctcaccaataatagtctcgtggaactgggtgatctggaccctctggcatctctcaaatcgctgacttacctaagtatcctaagaaatccggtaaccaataagaagcattacagattgtatgtgatttataaagttccgcaagtcagagtactggatttccagaaagtgaaactaaaagtaagtagtaatctgttgcttgtgagccattatagagttgtgtgtttttctttatatttttgttactgattattaaaattgtctaaatgagtaaattttaccattagtttgtaataaaagtgggagggaaaatgttacatcacatttttttctaatagcagagtttatgatagaacttttaagttggagctcttttatgtaatgctggctattccgaagttcgcaaagtgctgaggccacggtgagcagtcttaacagtggattgtctgcctagatacgttcccagcggagaacttaatgtaacctactttcgtgcagctccgtgtgttaggatgatttttccctttattaggaattcattattttattattcatttaattgccttcttagttccctgggatcccctccttggagctaggagaatgaactttcttcagggagctctaccaaagaaagaagaccactgtgtcttctcttaatttgaaattgctttttggtattttcaccagcccggagtactgtaggagagttcgcttccatgtcttctgaggaatgcatctaaatgcatgtggtattcctatttccattaactctgtgtgtggtgtcgctgtaggagcgtcaggaagcagagaaaatgttcaagggcaaacggggtgcacagcttgcaaaggatattgccaggagaagcaaaacgtaagacacggatatccaacttaactctacttcaccttcagaaacatgatctgatctgtctggcagttcgtctcctacaaaattaaccaaaaactctgacatattaatgtggtattaaatttgagtgcttatagtccatgtacatcaatggtccacacatcacaagaaatttctaccagcttagcagagcaaatatttcagtagtcagtcttcatgtgataccatgtacatcctattttctatataggaagatgaactggatggtgtttctgaaggagagagttcttgtatcagtttgttaacaaagataagatactacactggttgaattactttcaaaagcttttgaaagtaaaagagaagcaacttctgttggtctaggtctaacagttatgttcttccccctcttaagttttaatccaggtgctggtttgccaactgacaaaaagaaaggtgggccatctccaggggatgtagaagcaatcaagaatgccatagcaaatgcttcaactctggctgaagtggagaggctgaaggggttgctgcagtctggtcagatccctggcagagaacgcagatcagggcccactgatgatggtgaagaagagatggaagaagacacagtcacaaacgggtcctgagcagtgaggcagatgtataataataggccctcttggaacaagtcttgcttttcgaacatggtataatagccttgtttgtgttagcaaagtggaatctatcagcattgttgaaatgcttaagactgctgctgataattttgtaatataagttttgaaatctaaatgtcaattttctacaaattataaaaataaactccactcactatgctaaaaaaaaaaaaaaaa

SEQ ID NO: 28101 - DNA, 3034 bp, Homo Sapiens
gggggggcggcgcggcgggccccggcggccgaagaggctggcaggtggcgccgtggggtgggtgctcctggtgagaggagtccactccgtgcgtgcgggcggaggccggcccccgagagccgccgacatgaagaaagacgtgcggatcctgctggtgggagaacctagagttgggaagacatcactgattatgtctctggtcagtgaagaatttccagaagaggttcctccccgggcagaagaaatcaccattccagctgatgtcaccccagagagagttccaacacacattgtagattactcagaagcagaacagagtgatgaacaacttcatcaagaaatatctcaggctaatgtcatctgtatagtgtatgccgttaacaacaagcattctattgataaggtaacaagtcgatggattcctctcataaatgaaagaacagacaaagacagcaggctgcctttaatattggttgggaacaaatctgatctggtggaatatagtagtatggagaccatccttcctattatgaaccagtatacagaaatagaaacctgtgtggagtgttcagcgaaaaacctgaagaacatatcagagctcttttattacgcacagaaagctgttcttcatcctacagggcccctgtactgcccagaggagaaggagatgaaaccagcttgtataaaagcccttactcgtatatttaaaatatctgatcaagataatgatggtactctcaatgatgctgaactcaacttctttcagaggatttgtttcaacactccattagctcctcaagctctggaggatgtcaagaatgtagtcagaaaacatataagtgatggtgtggctgacagtgggttgaccctgaaaggttttctctttttacacacactttttatccagagagggagacacgaaactacttggactgtgcttcgacgatttggttatgatgatgacctggatttgacacctgaatatttgttccccctgctgaaaatacctcctgattgcactactgaattaaatcatcatgcatatttatttctccaaagcacctttgacaagcatgatttggatagagactgtgctttgtcacctgatgagcttaaagatttatttaaagttttcccttacataccttgggggccagatgtgaataacacagtttgtaccaatgaaagaggctggataacctaccagggattcctttcccagtggacgctcacgacttatttagatgtacagcggtgcctggaatatttgggctatctaggctattcaatattgactgagcaagagtctcaagcttcagctgttacagtgacaagagataaaaagatagacctgcagaaaaaacaaactcaaagaaatgtgttcagatgtaatgtaattggagtgaaaaactgtgggaaaagtggagttcttcaggctcttcttggaagaaacttaatgaggcagaagaaaattcgtgaagatcataaatcctactatgcgattaacactgtttatgtatatggacaagagaaatacttgttgttgcatgatatctcagaatcggaatttctaactgaagctgaaatcatttgtgatgttgtatgcctggtatatgatgtcagcaatcccaaatcctttgaatactgtgccaggatttttaagcaacactttatggacagcagaataccttgcttaatcgtagctgcaaagtcagacctgcatgaagttaaacaagaatacagtatttcacctactgatttctgcaggaaacacaaaatgcctccaccacaagccttcacttgcaatactgctgatgcccccagtaaggatatctttgttaaattgacaacaatggccatgtatccccatgcccggttacgctgtatgtgcacctgcaacaggtgtacattttgcatctgtcagaacttcctcaactcagacttgctgcaatctgtaaagaacaaaatcttcactgcagttcttaacagaattatttctgcttaagtttagaaatgagccagaagcggccaggcgtggtggctcacgcctgtaatctcagcactttcggaagccgaggtgggtggatcacctgagatcaggagatcgagaccatcgtggccaacacggcacgtgacacaagctgacctcaagagctccacgttttggcttcgagcaagttttggtgctactgtttttgcagttttgggctttgctatgtacaaagcattattgaaacagcgatgatataaaaagaaatactgtccctaccaaaaacaaatacttttatgtacattctgaatgctttaagttctgctagaattattgagatatttatacatgcagagttactttattaatatttgtaattcatgcataagagtattttaatgatagttataactgcagtattggctagcatatggaaagaaaacagctaacagccaaactaaaatggctaaattccagaggccaaaagggaatattttgtaaatatatgtacatattcaggcaagatatggtctcccaagctgagttctagaaatgatgtttctagacatttctaagtggtattgttagtgctcacttggctcactcttctaggtttaagttagcccagagattgtatttactcatggatcactttatttatttcacatttactcagaatgatcctttgggttctataaggacataaggtacaatttgccattgtctctccatttttaaaaacatacaagtcagtgtcagcttaccaacatgacattttttcagtcagttgtggtaggccagccttgaagccatcgcacagtctagaaacttgtgtagctgagtgtgcagctcacctttaagggtgaagttaggtaaaagcaattagcagaggcgttatctatgtgattatgttgcttccttgtcagtatgttgaattttatagccctttcaatgaaataaaaaaaaaatttgtatattaccaatgtttttagtttaaataaagagtcacccttactactgttgaaaagaaaaaaaaaaaaaaaa

SEQ ID NO: 28102 - DNA, 2634 bp, Homo Sapiens
gggtctgggcgtgccgcgggtgacggcggggccgggcgggccaatgggcgctgggtggcgggcgggcgggcctggcggccgggggctttaggacgtgagcgggcggccggccggacagactgacgtgtgagctgcatcgcgggaggcgcatggcggggatggcgctggcgcgggcctggaagcagatgtcctggttctactaccagtacctgctggtcacggcgctctacatgctggagccctgggagcggacggtgttcaattccatgctggtttccattgtggggatggcactatacacaggatacgtcttcatgccccagcacatcatggcgatattgcactactttgaaatcgtacaatgaccaagatgcgaccaggatcagaggttccttggggaagacccaccctacgaagttggaatgagaccatcagatgtgataagaaactcttctagatgtcaacataaccaaccttataaagactaaaattcatgagtagaacaggaaaatcatcctgactcatgtgttgtgttctttatttttaattttcaaagaggctcttgtatagcagtttttgtctattttaacattgtagtcatttgtactttgatatcagtattttcttaacctttgtgactgtttcaatattacccccgtgaaagcttttcttaatgtaactttgagtacattttaattgccttctatttttaaaactcaaaatcattagttgggctttactgttcttgctattgtatggcatatacatctgcctggatatatttctactcttgaccaaagttttgtaaagaacaatataagatttcgggtaggggtatggggagggaagatattttattgagaactacttaacaaaagatttatctgtaagcttgaactcaggagtacagttttagctatctagactctaacagcttttgctttaaaattattaaagtgtttcttaatgaaaaagaaaagatcttgctaaagttaaaataaggaacatttcaccttttaaatatttaattcttatgtggacttatttccagaaaactttggtgataattcttgagacaaaaggtggttaagtagcattattatgtaatgcttatataccatagagtttttaatagaagagaaatccatttcctccgagggtcactattaacaatgtacttccttaaatttagtttaatgattgtaatgggtgctgcatttgcacattgcattaagttatgatgagacgaattgttgttaaaaattatagcaaaaagaaatgtaaacttggttaaaatcctttcactctttgtattgttttttttaaggtttttattccttaaatgtaaaatgactacctaattttttgatgtaaatacattaaattcaaagagaaaaaaaatcagctgatgtagcagtatatcttttccttgatggttaaatattgatctagtatttatattgctgaattattttctgtggaggaccagataagcagtaagtatgtcttatcctatatgttttgcaacataaaaatattgctaattgaaaagaattaggcaattatgtgtgttgctgggttgtttttttgtttttttttttttgagacggagtcttgccctgtcgcccaggatggagtgcaacagcatgatctcggttcactgcaacctccatctcctgggatcaagtgattctcctgcctcagcctcctgaatagctgggattacaggcacctgccaccatgcctggctaattttttgtatctgtagtagagacggggtttcactgtgttggccaggatggtctcaaactcctgacctcctgatccacctgcctcggcctcccaaagtgctgggtttacaggcgtgagccaccgcgcccggccaaaattgaggtattttttgccctacgttttaaggactagacttttgaagtattttatagtctagaggtctcaagtaatatatatgtgtttaatatttttagagccaattgataccacaattagataggagtagtgagaataatatggaattacttggtttgaagtagttaaaaattggatatggttatatctgagctgtagtcatattatctcaagaaaaataatacgaggatttaacataagatttgttctattaatgcccaaatttggctttcctctactatcccccatagagaaccactaacaagtggatgtctaatattcctctggtgagttgaaggcaggagaagttgagaatcattagtttcaatgagtatccaggtgacctatcctggccctctactcagaaaccggcaatttgtcttcactctgagattcattaaattgctgttgtataactgatggttattatgaacactgacctgtgagacatatggaagataaagtttggtcttacaggaaatcttgaggagagtcaaaagagaaatgggagatgtctcttgagaggtgatcagagaagtttatgctcactgtctgatgcaaatgtctggtctatttgttagtaaataacagggaaatcattttcactttttgttaaaaataaggtatttacaagcataccttgtagttattgtgggttcagtttcagaccactgcaataaagtgaatatctcaaaaaaaaaaaaaaaa

SEQ ID NO: 28103 - DNA, 3365 bp, Homo Sapiens
cgggtgaaaagctcggatctgtgtttggggaaggccaggcttgcgctcctcgccgggttccgcgaaggttaaccttggctgacttggctcgcgagcaaagggcagcgtctgagctcccggcgttccaggagtggcctcttttgtaggagcacctgaaatgcagcgtctggtgcactaagccgtagcggcagcagcagccacagcgacagcgctggggccctgtgtagaagctccatcccccttgtctttgtgcttgcctgcgtccccagactcagagattatcttagaagacctaggactccaaaaatgtttcccctgaaggacgctgaaatgggagcctttaccttctttgcctcggctctgccacatgatgtttgtggaagcaatggacttcctctcacaccaaattccatcaaaattttagggcgctttcaaatccttaaaaccatcacccatcccagactctgccagtatgtggatatttctaggggaaagcatgaacgactagtggtcgtggctgaacattgtgaacgtagtctggaagacttgcttcgagaaaggaaacctgtgagctgttcaacggttttgtgtatagcatttgaggttcttcagggcttgcagtatatgaacaaacatggtatagtacacagggcattgtctcctcataatatcctgttggaccgaaagggacatattaaattggctaaatttggactttatcacatgacagctcatggtgatgatgttgatttcccaatagggtatccctcgtacttggcccctgagggaagaaaattatttcagagcttggatatttctgaaagactaaaatttttgcttactttggattgtgtagatgacactttaatagttctggctgaagagcatggttgtttggacattataaaggagcttcctgaaactgtgatagatcttttgaataagtgccttaccttccatccttctaagaggccaaccccagatgaattaatgaaggacaaagtattcagtgaggtatcacctttatataccccctttaccaaacctgccagtctgttttcatcttctctgagatgtgctgatttaactctgcctgaggatatcagtcagttgtgtaaagatataaataatgattacctggcagaaagatctattgaagaagtgtattacctttggtgtttggctggaggtgacttggagaaagagcttgtcaacaaggaaatcattcgatccaaaccacctatctgcacactccccaattttctctttgaggatggtgaaagctttggacaaggtcgagatagaagctcgcttttagatgataccactgtgacattgtcgttatgccagctaagaaatagattgaaagatgttggtggagaagcattttacccattacttgaagatgaccagtctaatttacctcattcaaacagcaataatgagttgtctgcagctgccacgctccctttaatcatcagagagaaggatacagagtaccaactaaatagaattattctcttcgacaggctgctaaaggcttatccatataaaaaaaaccaaatctggaaagaagcaagagttgacattcctcctcttatgagaggtttaacctgggctgctcttctgggagttgagggagctattcatgccaagtacgatgcaattgataaagacactccaattcctacagatagacaaattgaagtggatattcctcgctgtcatcagtacgatgaactgttatcatcaccagaaggtcatgcaaaatttaggcgtgtattaaaagcctgggtagtgtctcatcctgatcttgtgtattggcaaggtcttgactcactttgtgctccattcctatatctaaacttcaataatgaagccttggcttatgcatgtatgtctgcttttattcccaaatacctgtataacttcttcttaaaagacaactcacatgtaatacaagagtatctgactgtcttctctcagatgattgcatttcatgatccagagctgagtaatcatctcaatgagattggtttcattccagatctctatgccatcccttggtttcttaccatgtttactcatgtatttccactacacaaaattttccacctctgggataccttactacttgggaattcctctttcccattctgtattggagtagcaattcttcagcagctgcgggaccggcttttggctaatggctttaatgagtgtattcttctcttctccgatttaccagaaattgacattgaacgctgtgtgagagaatctatcaacctgttttgttggactcctaaaagtgctacttacagacagcatgctcaacctccaaagccatcttctgacagcagtggaggcagaagttcggcaccttatttctctgctgagtgtccagatcctccaaagacagatctgtcaagagaatccatcccattaaatgacctgaagtcagaagtatcaccacggatttcagcagaggacctgattgacttgtgtgagctcacagtgacaggccacttcaaaacacccagcaagaaaacaaagtccagtaaaccaaagctcctggtggttgacatccggaatagtgaagactttattcgtggtcacatttcaggaagcatcaacattccattcagtgctgccttcactgcagaaggggagcttacccagggcccttacactgctatgctccagaacttcaaagggaaggtcattgtcatcgtggggcatgtggcaaaacacacagctgagtttgcagctcaccttgtgaagatgaaatatccaagaatctgtattctagatggtggcattaataaaataaagccaacaggcctcctcaccatcccatctcctcaaatatgaagaaccaagagtgtgactgccaaaacttagtgtggcatcagcaccaacagcacagttcttcatatccacgccactctcagacaaaactagatgtccagattgttgcatttccgtaaagtttgtcacgagacattttttaaaatctcataacccacatgttcagttatccatgcaagaaacttgactctacatgtattgctgaaagaattttcttaacagtgaaatctgatcatatatttttaccacactgccacataaagcccaagaaattcagctgacaagacagatttagcattatcaagaaatcccatttgccctgaaaaagctgtcctccattgtactgaacagacagtcctgtcgattgtgttatttagaaacatacactgaatgtgggctgaaatcatcatctttccataatgaaaactgagaaactattcacaatgcattccttataaataaatgctacatttagtaacccaaaaaaaaaaaaaaaa

SEQ ID NO: 28104 - DNA, 2722 bp, Homo Sapiens
attgtccggagtgggtccttgacattcaggaaagatacatccttagacctttcaaaatttgtcatgcctctctaacctaaaacagccctcattaaatgcactttaatccgagcactgtatggcttggaaagaattatgagtgaggagaggagcctttccttattggccaaagccgtggatcccagacaccccaatatgatgacagatgtggttaaacttctctctgcggtatgcattgtaggggaagaaagcatccttgaagaagttttagaagctttaacttcagctggtgaagaaaaaaaaattgacagatttttttgtattgtggaaggcctccggcacaattcagttcaactgcaagtagcttgtatgcagctcatcaatgccctggttacatctcctgatgatttggatttcaggcttcacatcagaaatgaatttatgcgttgtggattgaaagagatattgccaaatttaaaatgcattaagaatgatggcctggatatccaacttaaagtctttgatgagcataaagaagaagatttgtttgagttatcccatcgccttgaagatattagagctgaacttgatgaagcatatgatgtttacaacatggtgtggagcacagttaaagaaactagagcagagggatattttatttctattcttcagcatcttttgctgattcgaaatgattattttataaggcaacaatacttcaaattaattgatgagtgtgtatcccagattgtattgcatagagatggaatggatccagacttcacatatcgaaaaagactagatttagatttaacccagtttgtagacatttgcatagatcaagcaaaactagaagagtttgaagagaaagcatcagaactttacaagaaatttgaaaaagagtttaccgaccaccaagaaactcaggctgaattgcagaaaaaagaggcaaagattaatgagcttcaagcagagctacaagcttttaagtctcagtttggtgccttgccagctgattgtaatattcctttgcctccctctaaagaaggtggaactggccactcagcacttcctcctccgcctccactgccttctggtggaggggtgccgcctccacctcctcccccaccacctcctccacttccaggaatgcggatgccattcagtggtcctgtgcctccaccacctcccctgggattccttggaggacaaaattctcctcctctaccaatcctgccatttgggttgaaaccaaagaaagaatttaaacctgaaatcagcatgagaagattgaattggttaaagatcagacctcatgaaatgactgaaaactgtttctggataaaagtaaatgaaaataagtatgaaaacgtggatttgctttgtaaacttgagaatacattttgttgccaacaaaaagagagaagagaagaggaagatattgaagagaagaaatcgattaagaaaaaaattaaagaacttaagtttttagattctaaaattgcccagaacctttcaatcttcctgagctcttttcgggtgccatatgaggaaatcagaatgatgatattggaagtagatgaaacacggttggcagagtctatgattcagaacttaataaagcatcttcctgatcaagagcaattaaattcattgtctcagttcaagagtgaatatagcaacttatgtgaacctgagcagtttgtggttgtgatgagcaatgtgaagagactacggccacggctcagtgctattctctttaagcttcagtttgaagagcaggtgaacaacatcaaacctgacatcatggctgtcagtactgcctgcgaagagataaagaagagcaaaagctttagcaagttgctggaacttgtattgctaatgggaaactacatgaatgctggctcccggaatgctcaaaccttcggatttaaccttagctctctctgtaaactaaaggacacaaaatcagcagatcagaaaacaacgctacttcatttcctggtagaaatatgtgaagagaagtaccctgatatactgaattttgtggatgatttggaacctttagacaaagctagtaaagtctctgtagaaacgctggaaaagaatttgaggcagatgggaaggcagcttcaacagcttgagaaggaattggaaacctttccccctcctgaggacttgcatgacaagtttgtgacaaagatgtccagatttgttatcagtgcaaaagaacaatatgagacactttcgaagttacacgaaaacatggaaaagttataccagagtataataggatactatgccattgatgtgaagaaggtgtctgtggaagactttcttactgacctgaataacttcagaaccacattcatgcaagcaataaaggagaatatcaaaaaaagagaagcagaggaaaaagaaaaacgtgtcagaatagctaaagaattagcagagcgagaaagactcgaacgccaacaaaagaaaaagcgtttattagaaatgaagactgagggtgatgagacaggagtgatggataatctgctggaggccttgcagtccggggctgccttccgcgacagaagaaaaaggacaccgatgccaaaagatgttcggcagagtctcagtccaatgtctcagaggcctgttctgaaagtttgtaaccatggtaataaaccgtatttataaattgaaaaaaaaaaaaaaaaagaaaaaaaaaaaaaaa

SEQ ID NO: 28105 - DNA, 3706 bp, Homo Sapiens
gcgactgcgggcggcgcggcgcaggggcagccagcgaggagcggcggcagaggaaaggccaggcaggcgccgcctgcggagagcaccgggcggccgggcctgcgtggtgccgcgcgcggcggcggcgacgacgacttcctccgggccgggcgggacagcgcagggccatggccgaggcggtcgcggctccgatttctccgtggacgatggcagccacgattcaggccatggagaggaagattgaatcgcaggctgctcgcctgctttccctagaaggtcgaaccgggatggccgagaagaagctggctgattgcgagaagacagccgtggagttcgggaaccagctggagggcaagtgggccgtgctggggaccctgctgcaggagtacgggctgctgcagaggcggctggagaacgtggagaacctgctgcgcaacaggaacttctggatcctgcggctgcccccgggcagcaagggggagtcccctaaggagtggggcaagctggaggactggcagaaggagctctacaagcacgtgatgaggggcaactacgagacgctggtctccctggactacgccatctccaagcccgaggtcctctcccagattgaacaagggaaggagccctgcaactggcgccgccctggccccaagattccagatgttcctgtggaccccagtccaggctcggggcccccagttcccgccccagacctcttgatgcagatcaagcaggagggtgagctccagctccaggagcagcaggccctgggcgtggaggcgtgggcagccgggcagccagatattggggaggagccctggggcctcagccagctggattccggagcaggagacatctccacggatgccacctctggtgtccattccaacttttccaccaccatcccgcccacctcctggcaaacggatctccctccccaccatccctcttcagcatgctcggacgggaccctgaagctcaacacagcagcctccacggaagatgtaaaaattgtaataaaaacagaagtccaggaagaggaggtggtggccacacccgtacatcctactgacctagaggctcacgggaccctgtttggaccaggccaagccacacggttcttccctagtcctgcccaggaaggagcctgggaaagccagggcagctccttccccagccaggaccctgtgctggggctgcgagagcccgcccggcctgagagggacatgggtgagctcagtcctgctgtggcccaggaggagacccctcctggggactggctcttcggaggggtccggtggggctggaatttccggtgtaaaccgccagtgggcctgaacccgaggacggggcccgaggggcttccttactcctccccggacaacggagaggccatcttggaccccagccaggccccaaggccattcaacgaaccctgtaaataccctggccggaccaaaggctttggccacaagccagggctgaagaagcaccccgcggcgccccccgggggccggcccttcacctgcgccacgtgtgggaagagcttccagctgcaagtcagcctgagcgcgcaccagcgcagctgtggggcgcccgacgggtcgggcccgggcacaggcggtggcggcagcggcagtggcggcggcggtggcggcagcggtgggggcagcgcacgggatggcagcgcccttcggtgtggggagtgcggccgttgcttcacgcgccccgcgcacctcatccgccatcgcatgctgcacaccggcgagcggcccttcccctgcaccgagtgtgagaagcgcttcaccgaacgctccaagctcatcgaccactaccgaacgcacacgggcgtgcggcccttcacctgcaccgtctgcggcaaaagcttcatccgcaaggaccacctccgcaagcaccagcgcaaccatgcagcgggcgccaagaccccggcccgaggccagccactcccgacgccgcccgcacctcctgatcccttcaagagccccgcctccaaaggacctttggcctccacagaccttgtgaccgactggacttgtggcctcagcgtcctgggacccaccgatggcggggacatgtgagcgcctccagccccatagcccctgccggccgcacgtgtaaaaagccccgtgtgcaggcagcagggcggcgtggaagcttcaggcagacgcgggacggggagaaccaaatgtccaagttgctgaactgatgatcactggagaaagagaaactatccaccaggacagctgccacctctaaaccaagtagaattctctgtgaaatgggagcgccgtagaattttaagtaatttaattgcaaacctgttttgttttttgttttttgtttttttttaattcttgaggaaaaagctggaaaatagtaatagggctatttaaattttgtaggtacttttggttttcagggcgtgcatttctgtcactatctcactgagtctgatagtgtgttggaaggttggccagttggggacccctggcccactgactcctggggatggggtcctgtgtgtgcccctgctctgcccagttgggctgagtgggcctagcgcaccaagcccctgggcagtgagggccattgggtcccttggagcacacctcagtgcagcaggaaggacccctccgggagtagcggttgcatttcccagcttgcctctcctgaaaaggccccccaaaagtgctggccccaacttttctctattttgggccatctgtggtacccgtcccaagggcacttggtggtgtcccctagtgtgtgactccctggcctcataaggacgagttgtctgaaatcccagcgttaggtctggggagatggagaagctgaaactggggagctgcaccacaaacgtctagctctcagcagagctgggagcaaagcctggccgcccaccccaacctggggctgcctcccactccgtgagatgcttctgtctcctgttcactttgtgtggtagtttcttattttcaaaatgcatctcatttgatcattactgtgaccttgggaagcagcaggacagggatttctttttagaggtgcaaactgctcagaggggacacacctcagcctctcactgtgggtacacgtggcgtgccatgagtggggaagagcaacaggcgagatgcctcattctactggaacatcactgtgggtgaacagagatttccaggttttccctcttaaaatatttgtcccacaccgacaagagtccagtcaccaggcctcaaaggaacttctgcttgtagcagccgcctcccctgtgccccagcctccttaatgtgtgcactctcagagggcacagctcgcgaggctgggtttgggggccaagtggcttgttcattccagcatctaacatcataaaggtgggcccagatttcttgattcgaccacagtgctgttcctaccacacaaatatccattcctgttttgttgaagcagccactggtcctcttgtttcccctgcagacggagggacctggcagtgcccattcattcagccccctcatgcatacttttattaggcgatagactagttaagaaaattgtttctatgtactgtatattttgtacctgtttacacttctaatattgatataactgatattttgaaaaataagagaaaacatcctgttaaaataaaacctaaccagcaccaaaaaaaaaaaaaaaa

SEQ ID NO: 28106 - DNA, 2725 bp, Homo Sapiens
gaaagtgactggcagtgggctctgcggcgcagcttcatctgtcggcacctgcacagctatcccggggctgccctcgaccagctcctcgcgctctccgccgcctggaccaaccacgtcttcctgggctgcaggtacagcccacgcttgatggaaaaaattctccaaatggctgaaggtattgatattggggagatgccttcatatgatctggtgctgtccaaaccttccaaaggtcaaaaacgccacctctcaacatgtgatggtcaaaatcctcctaaaaagcaagccggttccaaattccatgcgagacctcgttttgagcctgtacattttgtagctagtagttcaaaagatgaaagacaggaagatccttatggccctcaaacaaaagaggtaaatgaacaaacacattttgccagcatgccaagagacatctaccaagattatactcaagactctttcagtatacaagatgggaattctcagtattgtgattcatcaggattcattctcacaaaagaccagcctgtaacagccaacatgtattttgacagtgggaaccctgccccaagcaccacatcacagcaggcaaactctcagtcaactcctgagccttcaccatcacagacatttcccgagtctgtggtagccgagaagcagtattttattgaaaaattaacggcgacaatctggaagaacctttctaatccagaaatgacttctggatctgataaaattaattatacatatatgttaactcgttgtattcaggcgtgtaagacaaatcctgagtatatatatgctcctttaaaggaaattcctcctgccgacatccccaaaaataaaaaacttctaactgatggctatgcttgtgaagttagatgccaaaatatctacttaactacaggttatgctggcagcaagaatgggtccagggatcgagctacagagctagctgtaaaactcttgcagaaacgtattgaagttagagttgtccggcggaaattcaagcatacatttggagaggacctcgtggtgtgtcagattggcatgtcctcctatgaatttcctccagctctgaagcaaccagaagacctggtggtgctgggtaaagatgcttccgggcagccaatttttaatgcttctgccaaacactggaccaattttgtcattacagaaaatgcaaatgatgcaattggtatccttaacaattctgcctcattcaacaagatgtcaattgaatacaaatatgagatgatgccaaatcgcacatggcgttgtcgagtgtttttacaagatcactgcttagctgaaggttatggaaccaagaaaacaagtaaacatgcagctgccgacgaggctttgaaaattcttcaaaaaacacagcccacttatccatctgtcaaaagttcacaatgccatacaggctcttcacccagaggatctggaaagaagaaagatataaaggatcttgtagtttatgagaattcttcaaatcccgtgtgcacgctgaacgacacagctcagtttaaccgaatgacagttgagtatgtctatgaaaggatgacaggcctccgctggaaatgcaaagtgattctagagagtgaagtaattgcagaagcagttggggtgaagaaaactgtcaaatatgaagctgctggggaagctgtgaaaaccctcaaaaagacccagccaactgtcattaacaacttgaagaaaggagctgttgaagatgtgatttcaagaaatgaaattcagggccgctcagcagaggaggcttacaaacagcaaatcaaagaagataatattggaaatcagctgctgagaaagatgggttggactggtggtggtttaggtaaatctggtgagggcatacgggagcctatctcagtgaaagagcagcataagcgggaagggcttggtctggatgtagagagggtgaataaaattgccaagagagatattgaacagatcatcagaaactacgcccgctccgagagccacacagatttgactttctctagagagctgactaatgatgaacggaagcaaatacatcagattgcccagaagtatggtcttaagagtaagtctcatggggtgggccatgataggtacctagtggtaggtagaaaaagacggaaggaagacctactagatcagctcaaacaggaaggccaagtgggccattacgagcttgttatgcctcaagcaaattgagatcttactaatttattttgtaaatgcctaatgaggcagatttttgaattaaagaaatgctacatgttccggttgcagagtatattcataagatgtctcaccttgttcatttcacatagtggtttattagatattggaacctaaagaattctgtccacttgtattagcttaatccagcagatgatattgtgcagttactgtttgtgtctttgatattgctgtgtccctcagattttagtagtttgacaagcaagaacacatatccaaatggaattttaccctgagaaattatcattttaaagggcatagcacagcaatctgcaacaatatgtaaagttgatattgactacaataaaaatccagtcttaattcaagatttactgaaaatgtcagatcattttgtattaatctattttcatctttgtgtgaagccagttatagaatgtttgacaataaattgtgctgtacacgtaaatgtccttaccaactaaaaaaaaaaaaaaaa

SEQ ID NO: 28107 - DNA, 3051 bp, Homo Sapiens
tggcggctcactcaggacccagcgggggcagcgcgatgaggcgggtgaccctgttcctgaacggcagccgcaaaaacggaaaggtggttgctgtatatggaactttatctgatttgctttctgtggccagcagtaaactcggcataaaagccaccagtgtgtataatgggaaaggtggactgattgatgatattgctttgatcagggatgatgatgttttgtttgtttgtgaaggagagccatttattgatcctcagacagattctaagcctcctgagggattgttaggattccacacagactggctgacattaaatgttggagggcggtactttacaactacacggagcactttagtgaataaagaacctgacagtatgctggcccacatgtttaaggacaaaggtgtctggggaaataagcaagatcatagaggagctttcttaattgaccgaagtcctgagtacttcgaacccattttgaactacttgcgtcatggacagctcattgtaaatgatggcattaatttattgggtgtgttagaagaagcaagattttttggtattgactcattgattgaacacctagaagtggcaataaagaattctcaaccaccggaggatcattcaccaatatcccgaaaggaatttgtccgatttttgctagcaactccaaccaagtcagaactgcgatgccagggtttgaacttcagtggtgctgatctttctcgtttggaccttcgatacattaacttcaaaatggccaatttaagccgctgtaatcttgcacatgcaaatctttgctgtgcaaatcttgaacgagctgatctctctggatcagtgcttgactgtgcgaatctccagggagtcaagatgctctgttctaatgcagaaggagcatccctgaaactgtgtaattttgaggatccttctggtcttaaagccaatttagaaggtgctaatctgaaaggtgtggatatggaaggaagtcagatgacaggaattaacctgagagtggctaccttaaaaaatgcaaagttgaagaactgtaacctcagaggagcaactctggcaggaactgatttagagaattgtgatctgtctgggtgtgatcttcaagaagccaacctgagagggtccaacgtgaagggagctatatttgaagagatgctgacaccactacacatgtcacaaagtgtcagatgagaattttaggggctggaggaagatgtaaaagatgaaaatgttttccttatcacttttctttctccacccactcagttgtctagaagaaataacactgtaaggaaatttaaaaaaaaaaacatttagaggattatgcttgttttgagtggtgcataagggaaaaaactgactttttttccatattctgatttttaacagaaaagcactcatttaatagatgtagggaaactagatattgctgccttttgaatggggtaggggggtttacctggttttatgaccaggcatagtatctattatatttgcttttaaataggcatgatgtggaaataccatcttggtttgagatgcatttgaggattttaatttatggaaagcacaacatatgcaattatatttattgaattcctagatgcagtatggatatttaaattgttaaaactttatgaaaacttggaaaaggttgttcaggtttataaatagctttagtgatgcctcccctctttaaatacctgtcacaccgtatgaatatggtgagatcagactccctaagactcttttcaggttcatttttataatgtttactttttaggacagaacagtagctaaattaaagtaatatccagttcttactgattgagacagagtggaaagaaagacatcattgtacatcactgtcattccaaaggtacagtgtaactctggatggaggaataacttacctatcactacaacacttacaaatgagaatttctcagaatttcattctaggcaagttccactcaacaccagatcaagcaattctatctatttacactattagcctagttttctcatacagtcatcacaagcataggaagatacttcaaaaccaaaaaaaccaaggtgcatcattaatattcatttaattcaaataccaaatagtttacatagggccagcttagaaatagatactaaatccagagctactgcaatcaaagcttatatgagtgaatatggtagagttgcctgctaaaaggcaatgtaatataattgcagctagaaccctacagtggggaatgaggaattttaaacacacatttgattacagccaccaaaaaaatagacgtaaaaataaaggcatttggctggtccaagatgtaattatcaatcagtcagcacctgtgattcttttacttatttttttgtggtttttttttttaaacaaattttagcccaattttcttgagtcattctctctctgcagcagcagaggaagggcctgtacctccctaccaatgacttggtgtccttattttctaccccaagagcagggatattagctgtgtccaaatgggttctgaattctacagactcatcaacatgaggcaaggaatcattgaaaaccacctgtgtctcctttgggagaatgacatatctttagtatttacgtagcttattcttctatatctacatatgcaaagctttccttaacagtaaagggtacatatgcatagtgggaggagatcagacctttacaagtgaaggaaagcaacttcagaaatgaattattttctttgctttattatttttaccaagacagagaagtattgtattgagagataatctattttcataatcaatatgtgcctaaattatatttaaatcatttcactctgtactatattttcaggaattacagaatgtggtattcattcacttaaaggtacctctgtagaaataacctaaaactgcagaaggatctgaaagatctaaacatggtgtgcttagaaactgcagattttagatctaatgtatactgcattaataaatgatataaagtgtttgttgaaaaaaaaaaaaaaaa

SEQ ID NO: 28108 - DNA, 3556 bp, Homo Sapiens
tggtgggcgcaaggcgcggcgggggtgatgagcccttgggttctcgctccgactgctaaattcgcttggccgggtccaccttctcgtggcctcactcgccacacggatcagaatccggagcaggcagttctctctattctgaggctcctgcggctgccgcgctgacttccctgtgtgcgggagggaactctgggcaggctggttttcttggaatgtgtttacgatgttgaatgggacttgaacaggaagctggacgctgcagctggaactagcgtgccaaggtagagtaaggaagacttagctggtgttgggcttggcgggtccacttggtacgctgggcaaactccaacagcaagaattgaagacttaagggtttgagcagatggttttctacctaaattgaataattcaattacgtattctcaactagcatggatttgggtcatggaattaaagtagaaacgtatccggcatgacttctttgtgcttatcaaaagtgatcctgataaacagatcttgctctttcatgtaaagaagtaaaagttatttatgattccatctgatatacataggagagaaactgatagaagaattctgatggcaactgtatgatagaagctatataaagtcaagtgtccattttctttcaactatatttgagcatacccaggatttaagtcgtggaactgaacatttatttggctgatcctcatcatgaaccgtgcttttagcaggaagaaagacaaaacatggatgcatacacctgaagctttatcaaaacatttcattccctataatgcaaagtttcttggcagtacagaagtggaacagccgaaaggaacagaagttgtgagagatgctgtaaggaaactaaagtttgcaagacatatcaagaaatctgaaggccagaaaattcctaaagtggagttgcaaatatcaatttatggagtaaaaattctagaacccaaaacaaaggaagttcaacacaattgccagcttcatagaatatctttttgtgcagatgataaaactgacaagaggatattcactttcatatgcaaagattctgagtcaaataaacatttgtgctatgtatttgacagcgaaaagtgtgctgaagagatcactttaacaattggccaagcatttgacctggcatacaggaaatttctagaatcaggaggaaaagatgttgaaacaagaaaacagatcgcagggttacaaaaaagaatccaagacttagaaacagaaaatatggaacttaaaaataaagtacaagatttggaaaaccaactgagaataactcaagtatcagcacctccagcaggcagtatgacacctaagtcgccctccactgacatctttgatatgattccattttctccaatatcacaccagtcttcgatgcctactcgcaatggcacacagccacctccagtacctagtagatctactgagattaaacgggacctgtttggagcagaaccttttgacccatttaactgtggagcagcagatttccctccagatattcaatcaaaattagatgagatgcaggaggggttcaaaatgggactaactcttgaaggcacagtattttgtctcgacccgttagacagtaggtgctgacatcaagaacaagaaatcctgattcatgttaaatgtgtttgtatacacatgtcatttattattattactttaagataggtattattcatgtgtcaatgtttttgaatattttaatattttgaaaattttctcagttaaatttcctcaccttcactattgatctgtaatttttattttaaaaacagcttactgtaaagtagatcatacttttatgttcctttctgtttctactgtagatgaatttgtaattgaaagacatattatacaaatacctgccttgtgtctgagttctatttagttagcatcttgaaatttgtattcattttccagatggctagtttattaatgatttcccaaaagccataccttaaagataactttttaaattctgaagagacatgccaatgtcaaactaaacatgttctgtttttaaaccaacaaacatgttactattcattggacagatatcattttatgtataaatactgttcacatcactgggaaaatgtaaactttaaacataatgccacaaggtcactaatttctagcaggtaaaattataaggatataaattccaataataaaccaaatgtatttagagtatttattagtaaatgcaaggtgatgttagttatgatcagttatactctaaatatttaatttgttttataaaggtagtgaaaaaatgaaaatttgctatttattaaaaaacattaaatttcattccaaatgagataagtgatattactataacatctaagcatcatctgatttgatattccctaaaaaacatttggaatatatgctatctatagattcagtatctactacccatatttactttaccaaatatatttctcctcactgcataaggactactcttctcatattttcttctttgatgaagatatttttcaccaaagtttattttgtgatgccctcttggttttgatactttaaaatctgtggcacccgttctacatgaattatcaatatttggtaaattcaatctgtatttgttttgttaaagtcaaaaatctcattttccaaaaaaaaaaaaaaacccagttactgctcagtttagtcttgaacatgagcaataaaattctcttgcatttcattattgatgtgctgatgaacctggacttttaaaaatatttgtttcctatacctttaccctttacctaacagactaatttgtactcagtaaaacaaaaatttatggtcaaaatttctaacttggttcatcacattataagataaataaattaaattaatgaaaatgtgacttagagtaggggtagccctcaaaaatagatttatcatttactcattggaattttcttcaagtgttaaaggtacattttcactaggaaaagaaatcaaatatgcttatgcaatatatatttgtgtgtttttccttaatgttatatggtatatatgagccttcttgtttagtttcttttatctgctaagttgtaccttaattagagggcaatatatgtttcataaagaagagtctttataattttgtttgtcagatagtattttggaatttgtataataaggatgtttagaagccatataagtggctttttttaacagatagaatttgtatttttattgtactttaaaaagatttatgtaataggtatatatttagtggccatttattatcaatggtaacacaatggagtactaagatggtatttgcacatttaagatatgttactttaccaatttttaatggtaatcaactctgctactggcatgatgaaatagtgcataactggtcattaattatgaacatttacttctccagtgcgtttttatgaagatctggttgaaaattgtatttctatgtaaactcaacgatatgtttggttttcctgaaaataaatgattttaaataaaaaaaaaaaaaaaa

SEQ ID NO: 28109 - DNA, 2797 bp, Homo Sapiens
gagggcggagaccaaggctgcgcaggcgtggttggccggtcgttgcgttgggatggatcaggcggaattccagaagagaaaataatccctgtctagatgcagaggacttggttcctattccagtgctcctccggtagcagggaggcgacagaaggtgtccaactatccattaccaagaagaaatctattcgtttgagcctgagacactctttgaggtaaaaaattagaatgaaagaacctttggatggtgaatgtggcaaagcagtggtaccacagcaggagcttctggacaaaattaaagaagaaccagacaatgctcaagagtatggatgtgtccaacagccaaaaactcaagaaagtaaattgaaaattggtggtgtgtcttcagttaatgagagacctattgcccagcagttgaacccaggctttcagctttcttttgcatcatctggcccaagtgtgttgcttccttcagttccagctgttgctattaaggttttttgttctggttgtaaaaaaatgctttataagggccaaactgcatatcataagacaggatctactcagctcttctgctccacacgatgcatcaccagacattcttcacctgcctgcctgccacctcctcccaagaaaacctgcacaaactgctcgaagtataaaattcttaacatccctttttactttaccttttttttagtgtgtatattgtttagttcaaacatactgttgatactttaaatctcttcagcatgtatctgtagaaataactttttagttaatggaagaattcaccaattttaaagttttgcaacattaaataagtgacttggtgttagaatattgcctaaaccagttttctatcactttaaattttactatggaaagaaataacaaatgacatgtgggaattgcaggactatcctgtaattgtagacacccaccatttaaatttatttaacagttatcttgaaagctattgggtatagcataaaataatatcactcttttaatagtatacaaaagctatttaattctttaaaaagtaaaaactctacatggtcgcaaaaatgtgtttatttctaatgtccttgtggggtcattgttgctttacaataatgcttagatgcagagagaggaaaaaacagcaacaaagtcacataaatctttccctgacttagtacatttgaaggatttggcatattttgcctatttctgtggtagtgtaatttgaggaatacagtgtgttgttaatagtcactacaggcaaaaaacagtaagagcttgcttttaaattgtggctctgtcatttatctctgtgacttcgggctagatgtttaactttctaagcctccatttctcatcagtaaataatagttgcttcctaggactttaatgagacagtgttagcaaatggcctagcacatagcaagtacttaaaaaatggaatcctgttattattaataataaaaattatatcgtgcgattatttataattaacataaataaatataataaatatatgtgtatataatacatattactatgtatacttaacatatcacttgtaggcccctattttgtctttggctgtgtttatctgctttgtgtcttgacttaaactatttaaaagtagatcctgctatatggaaatttccaagtaaagaggagagaggatttttttttttctttgttgcccatggtagagtgatcacagctcactgcagccttgaactccccgggctcagatgatcctcccacctcagcctttcaaatagctgggaccacaggcgcataccaccatgcccgactaatttttgtatttttttgtagagatggttttgctatgttgcccaggctggtctcaaactcctgggctcaagcaattagcctgcctcagcctcctaaagtgctgggactattggtgtgagccatcacatgtggccaggagagaggaattttaaaatatttatatactctaaattagtttgttgcaaaataccattctaattaatgcttttatgtcattctcatgaaactaatctgaaagagtaaacttagttttctatttttagatattgtttcaacataccaaataccaaaataaaattaaataattttaaagaacataacacaacttatacatccaaatgcctattgttttcttaaaagtagtcacccccgtcagtgactttttagcataaggttaggagacagattcttatcttttcagcatgcatttgatttttacaaattttcaaaggctgcttgataccttaatcaggccaatatattagctaattaaattaagtcatactgttaaaacatgatatttataaaattaaaagttaaaaaatagtctaagggtttatcttaagttttatcttaaaaaaattagaaaaatgttttgagctatgttattgttggaaggtgtggtttttctacggtaaatgttacgatataacactcatttgcatgtgtaaggttcagagtacacttataatttatgtgcacagattttcattataaagtcattctctttgatttacatatttttacttgctatttttgtacttattatgccactggcagattcaccttattaagtgaaactctttattgctctgttttcagtagaaaaatcacttttcaaaattaatacttcatctgtgtataagcatattcttttggtttctaagatttgctgtcatatttttaaagttgagttttaaagaattaaaataatttttgttgttgttaaaaaaaaaaaaaaaaaaaaagaaaaaaaaaaaaaaaa

SEQ ID NO: 28110 - DNA, 3554 bp, Homo Sapiens
gccgcagagacgccccgcccccgcgcggcgctgcggaaccggagctccgggcggcgtcggcagcggcgcgagaggcgacgaggcccgggcggcaggagccggcgcggcgaccgcggcgagggcggcggggacggagcagagcacgacgaagacgcacagtcgagtaatcctgcctgtgtctgtagatgagtatcaagtggggcagctgtattctgtggctgaggccagtaaaaatgaaacgggtggtggcgaaggcgtggaggtcctggtgaatgagccctacgagaaggacggtgagaaaggccagtacacacacaagatctaccacctgcagagcaaagtacccacgtttgttcgaatgctggccccagagggagccctgaatatacacgagaaatcctggaatgcttacccctactgcagaaccgttattacaaatgagtacatgaaagaagactttctgattaaaattgaaacctggcacaaaccagatcttggcacgcaggagaatgtgcataagctggagcccgaggcgtggaaacacgtggaagccgtatatatagacattgcagatcgaagccaagtgctcagcaaggattacaaggcagaggaagacccagcaaaatttaaatctatcaaaacaggccgaggacccttgggccccaattggaagcaagagcttgtaaaccagaaggactgcccatatatgtgtgcatacaaactggtgaccgtcaagttcaagtggtggggcctgcagaacaaagtggagaacttcatccataagcaagagaggcgtctgtttacaaacttccacaggcagctgttctgttggctcgataagtgggttgacctgaccatggacgacattcgaaggatggaagaagagacgaagagacagctgggtgaaatgagacaaaaggacccagtgaaaggaatgacagcagatgactaaagccgcctttcccctctgcactttttgcaagacagtggtcaacaggaagacccagcagctccaccctcccaagtgacaggccattttcggacgcagcagttctgtgcccattcttcaggcaactttcgattccttactgtagctaattctagatgcccttcagtattgtgaacaaatagaccgtctggtgtcacagagccagcgtgtgcaggagcctgctcctccgagatacgtggcgtgtaggttgctgtagttacagcgcctccgtctctctccattgtgttccgatccatttctgtgtgttcccccaacctttatttccaagtgacattttcagtctttcaaatagctgccttttgtgatgtggtgatttaaatgatttaagttcatttgttctcaaccttggggtaaactgaggtattttgcttcctgggaagatcttcgcaattttgagtgctcctgtggggagcggggatgagctaaagatacaatgtttccctgccccgcaccgcttccacaaaatagcaatgtggttttgcagctctgacttctgctcccagtaacccatcgttagggcactctagcactatggaggtacccaaggctcagccagtctctatttaagaaaatttaacaaatacgagtaaccctgtcccaatcactgaatctctagttactactcttagaaacacctgtggcttcttggccctcctgttgcccgctctgaatctctctgcagtctacaaaatcgccccagtcaactctccacttggagggaattgtccagtgtggcccctagaattgagtcaccccctagataccaactgtctgaccccgaggagctctgtaagtccctgctcctcctcttccctttggggctggtgctgccactcagcaataatcctcttttctctgtgctttcttaggtccctgtcctctgtctttgaggctggttaggaagcaagagtcctgatctttcatgctgcacaatatgagcatgcaaaaagctttttccagcagaacatgttccctcgtctccagttgccggaaaggaatttggggatcaagaacttagctcgtcctacccccatgttgagttctgccctggaaaacccaaagcaagtagtgatcatagtacagaacccgaccaaagtaggctggtgaggaagtccaggctccaggggaacagacgctgcccagtgttcatagcttcctgcaacttgacagagcctgagtttgcctcttagtgggagaatgagagagagctgtagtgtcacctgacattccccaaaccttgtgaagcacgttggcctaagtgtgccgtgatcccagcccacactagcctgggtgcatctgctaatgggagaccaaatctttgtccgggaagcaagaagtgggtgggagaatgtatcctgtttttgtcagtttgtttgccttactcatttctaagtgcaataagggagtgtctcacaggattgcacctgtgacatcctgatggatgcttccctgtggccctcctggggcaagggtggacagactcagacccccagcatggttagcgctgaccttcattgaggtccctttggaaccagatgtcttgttacagacaccttcctctgtgtaagtctcctcaccttgaggggtctttagtaatgcatctgggtagcatctcaactgctggtagcatttatctgacttggaaagttggagaagaggcattcctactggagaaaaatgtcagtgttttcctataagctctgtgttagctattcattatatttgtgcttaaagatgttccttcattcatcaactaggggaagtccagatgcgggttatcttgaaagaaacaaactgacattctaggcagacagttgtctatgtggtctgagggtcagcagctgttagtctccttcctttggctcttgagacccacacatatcactttagccctaacaagggctcctcccacctccacctgttgccccagttgaaaagcatccattatgagctgaggtcagcctggatctggaattgcagcccacataaacataaaggaggatgtccctggtctgttccatccccacggatggtgttgctgctgggcaacagtgttggcttcttttaagtaccccctttcctcctcacccacctccaaactgactagcactcagagggacttatgataaaggttcagctccaggggtagtacctgagtgtgtgccatgccccttcagaccagctgcttccatcagaattccagggtcacagccccaacagaagcagcagtgcctctgtaggaggggtgctgggctctggccttctcatgcagagaggtccgggacagggtcagtatcgtgggcatgtgtatagcttcccaagttcttttacagtccctgctgggactccctgacttactttggttggttcctagtgctacttgttttacaaactacactttgtagaattgattagattaccttgtttatttaatgtgagtttgtgcctttttgtctcaatcttccaatacaggtatattgagaaaaaaagcagtctaataaaatcctagacagaaaaaaaaaaaaaaagaaaaaaaaaaaaaaaa

SEQ ID NO: 28111 - DNA, 3037 bp, Homo Sapiens
agttcctctcccgccgcgccgggccgcgctgccgctcgctccccggccgtggcgcctccgggccagacgcgctgcagcctccagcccgcggcaagcggggcggccgcgccacccccggccccgcgccagcagcccctcgccgcgcgtccagcgttcccggccagcagcctccccatacgcaggtcctgctgggccgccccgtcgcgccccccactctgaactcaagtcaccgtggagctccgccgccccgaaactttcaccgcgagcgggaaatatgggatgtataaaatcaaaagggaaagacagcttgagtgacgatggagtagatttgaagactcaaccagttccagaatctcagcttttacctggacagaggtttcaaactaaagatccagaggaacaaggagacattgtggtagccttgtacccctatgatggcatccacccggacgacttgtctttcaagaaaggagagaagatgaaagtcctggaggagcatggagaatggtggaaagcaaagtcccttttaacaaaaaaagaaggcttcatccccagcaactatgtggccaaactcaacaccttagaaacagaagagtggtttttcaaggatataaccaggaaggacgcagaaaggcagcttttggcaccaggaaatagcgctggagctttccttattagagaaagtgaaacattaaaaggaagcttctctctgtctgtcagagactttgaccctgtgcatggtgatgttattaagcactacaaaattagaagtctggataatgggggctattacatctctccacgaatcacttttccctgtatcagcgacatgattaaacattaccaaaagcaggcagatggcttgtgcagaagattggagaaggcttgtattagtcccaagccacagaagccatgggataaagatgcctgggagatcccccgggagtccatcaagttggtgaaaaggcttggcgctgggcagtttggggaagtctggatgggttactataacaacagtaccaaggtggctgtgaaaaccctgaagccaggaactatgtctgtgcaagccttcctggaagaagccaacctcatgaagaccctgcagcatgacaagctcgtgaggctctacgctgtggtcaccagggaggagcccatttacatcatcaccgagtacatggccaagggcagtttgctggatttcctgaagagcgatgaaggtggcaaagtgctgcttccaaagctcattgacttttctgctcagattgcagagggaatggcatacatcgagcggaagaactacattcaccgggacctgcgagcagctaatgttctggtctccgagtcactcatgtgcaaaattgcagattttggccttgctagagtaattgaagataatgagtacacagcaagggaaggtgctaagttccctattaagtggacggctccagaagcaatcaactttggatgtttcactattaagtctgatgtgtggtcctttggaatcctcctatacgaaattgtcacctatgggaaaattccctacccagggagaactaatgccgacgtgatgaccgccctgtcccagggctacaggatgccccgtgtggagaactgcccagatgagctctatgacattatgaaaatgtgctggaaagaaaaggcagaagagagaccaacgtttgactacttacagagcgtcctggatgatttctacacagccacggaagggcaataccagcagcagccttagagcacagggagacccgtccatttggcaggggtggctgcctcatttagagaggaaaagtaaccatcactggttgcacttatgatttcatgtgcggggatcatctgccgtgcctggatcctgaaatagaggctaaattactcaggaagaacaccctctaaatgggaaagtattctgtactcttagatggattctccactcagttgcaacttggacttgtcctcagcagctggtaatcttgctctgcttgacaacatctgagtgcagccgtttgagaagaaaacatctattctctccaaaaatgcacccaactagctctatgtttacaaatggacataggactcaaagtttcagagaccattgcaatgaatccccaataattgcagaactaaactcatttataaagctaaaataaccggatatatacatagcatgacatttctttgtgctttggcttacttgtttaaaaaaaaaaaaaaactaatccaacctgttagattttgcaggtgaagtcagcagcttaaaaatgtctttcccagatttcaatgatttttttccccctacctcccaaaatctgagactgttaaaacatttttcttctatgaacactgctcagacctgctagacatgccataggagtggcgtgcacatctctctctcttccagcaggaggagcccgtgagcacgcacagctgccctgtctgctcacccgaaggcaccgggctcacctggacctcccaggaaagggagaagagcctcagaaactgctctgtgtttagaaggaatatttttaagagtccagctttttcatttccacaatttcctatatccagatttgttttgacaatgtagtttggaagaactaagattctaatctctgaagaaccttatagggccttctaaaacataagagtttcctttgttgcttcaaatatttgaacattatgttaaagatcaagtattaattttagttgtactctagaaagctaaagtgccacattcggggctatttttatgattcagcaatcttttctaaattgtgtagcatgtgtatgagactatttatacccaaggatatgaaggaacataagtgactacaaggctctaataagccacggtggcaggaggttcaagcggttctgttcactaaatttttctcctgtaagctttgaatggaaacttctgtatcacatgatgtgtttcacttatgctgttgtgtatatacctaatatttctatttttgattttattttaatacacctcgtccaataacgaaaaaaaaaaaaaaaa

SEQ ID NO: 28112 - DNA, 3241 bp, Homo Sapiens
gatggctgtgttgttgaagggcctgtagccggggggttcctggccggatcccggtctacccttagcccagactcgttccggaccccagcccggcccggaacactctgggcgagacggcggtggcaactctccccttgccgccatgcacgacgctttcgagccagtgccgatcctagaaaagctgcctctgcaaatcgactgtctggctgcctgggaggaatggcttcttgtgggaaccaaacaaggacatcttcttctctataggattcggaaggacgttggttgcaacagatttgaagtgacactagagaaatccaataagaacttctccaaaaagattcagcagatccatgtggtttcccagtttaagattctggtcagcttgttagaaaataacatttatgtccatgacctattgacatttcaacaaatcactacggtttcaaaggcaaagggagcatcactgtttacttgtgacctccagcacacagagaccggtgaggaggtgttacggatgtgtgtggcagtaaaaaagaagctgcagctctatttctggaaggacagggaatttcatgaattgcagggggactttagtgtgccagatgtgcccaagtccatggcgtggtgtgaaaattctatctgtgtgggtttcaagagagactactacctaataagggtggatggaaaggggtccatcaaagagctctttccaacaggaaaacagctggagcccttagttgcacctctggcagatggaaaagtggctgtgggccaggatgatctcaccgtggtactcaatgaggaagggatctgcacacagaaatgtgccctgaactggacggacataccagtggccatggagcaccagcctccctacatcattgcagtgttgcctcgatatgttgagatccgaacatttgaaccgaggcttctggtccaaagcattgaattgcaaaggccccgtttcattacctcaggaggatcaaacattatctatgtggccagcaatcattttgtttggagactcatccctgtccccatggcaacccaaatccaacaacttctccaggacaagcagtttgaattggctctgcagctcgcagaaatgaaagatgattctgacagtgaaaagcagcaacaaattcatcacatcaagaacttgtatgccttcaacctcttctgccagaagcgttttgatgagtccatgcaggtctttgctaaacttggcacagatcccacccatgtgatgggcctgtaccctgacctgctgcccacagactacagaaagcagttgcagtatcccaacccattgcctgtgctctccggggctgaattggagaaggctcacttagctctgattgactacctgacacagaaacgaagtcaattggtaaagaagctgaatgactctgatcaccagtcaagcacctcaccgctcatggaaggcactcccaccatcaaatccaagaagaagctgctacaaatcatcgacaccaccctgctcaagtgctatctccatacaaatgtggccctggtggcccccttgctacgcctggagaacaatcactgccacatcgaggagagcgagcacgtgctaaagaaggctcacaagtacagtgagcttatcatcctgtatgagaagaaggggctccacgagaaagctctgcaggtgctcgtggaccagtccaagaaagccaactcccctctgaaaggccacgagaggacagtgcagtatctgcagcatctgggcacagaaaacctgcatttgattttctcctactcagtgtgggtgctgagagacttcccagaagatggcctgaagatatttactgaagatctcccggaagtggagtctctgccacgtgatcgagtcctcggcttcttaatagagaattttaagggtctggctattccttatctggaacacatcatccatgtttgggaggagacaggctctcggttccacaactgcctgatccagctatactgtgagaaggtgcaaggtctgatgaaggagtatctcctgtccttccctgcaggcaaaaccccagtcccagctggagaggaagagggtgagctgggagaataccggcaaaagctcctcatgttcttggagatttccagctactatgatccaggccggctcatctgtgattttccctttgatggcctcttagaagaacgagctctcctgttggggcgcatggggaaacatgaacaagctcttttcatttatgtccacatcttgaaggatacaaggatggctgaggagtactgccacaaacactatgaccgaaacaaagatggcaacaaagatgtgtatctgtccctgcttcggatgtacctgtcgccccccagcattcactgcctggggccaatcaagctggaactactggagccaaaagccaacctccaggccgctctgcaggtcctcgagctacaccacagcaaactggacaccaccaaggccctcaaccttctgccagcaaacactcagatcaatgacatacgcatcttcctggaaaaggtcttggaagaaaatgcacaaaagaaacggttcaatcaagtgctcaagaaccttctccatgcagaattcctgagggtccaggaagagcggattttacaccagcaggtgaagtgcatcatcacagaggagaaggtgtgcatggtgtgtaagaagaagattgggaacagtgcatttgcaagataccccaatggagtggtcgtccattacttctgttccaaagaggtaaacccagctgacacttgagcccagcatcctggggatccagcggatggacagcttggctctcccagagaggtgaaggagcacctggccttaggaatcctggctgccaccaccacaaggctccccatttggacattactggctatcttgtgccctggaacaactctgaattaattagactcatggtctggcattgccagctttttaatgggaaaagagattagttataccttataccattatgttgtgggcaattccagagaattcagtacctgcttggtcaggaggatgtgcaccatcttgcctttgcacaccagtcacctgaacaaggaaacttgtcacaagtgtttgtaaccatggggttgttcatcaagggcttttctattaagtacatgacttcacaaggaccgctcagcatggctcactggagagttccatgagagaacagcactcaagcttctggccgcatggacccgaaaaaaaaaaaaaaaa

SEQ ID NO: 28113 - DNA, 2819 bp, Homo Sapiens
gactccggagcccgagcccggggcgggtggacgcggactcgaacgcagttgcttcgggacccaggaccccctcgggcccgacccgccaggaaagactgaggccgcggcctgccccgcccggctccctgcgccgccgccgcctcccgggacagaagatgtgctccagggtccctctgctgctgccgctgctcctgctactggccctggggcctggggtgcagggctgcccatccggctgccagtgcagccagccacagacagtcttctgcactgcccgccaggggaccacggtgccccgagacgtgccacccgacacggtggggctgtacgtctttgagaacggcatcaccatgctcgacgcaggcagctttgccggcctgccgggcctgcagctcctggacctgtcacagaaccagatcgccagcctgcccagcggggtcttccagccactcgccaacctcagcaacctggacctgacggccaacaggctgcatgaaatcaccaatgagaccttccgtggcctgcggcgcctcgagcgcctctacctgggcaagaaccgcatccgccacatccagcctggtgccttcgacacgctcgaccgcctcctggagctcaagctgcaggacaacgagctgcgggcactgcccccgctgcgcctgccccgcctgctgctgctggacctcagccacaacagcctcctggccctggagcccggcatcctggacactgccaacgtggaggcgctgcggctggctggtctggggctgcagcagctggacgaggggctcttcagccgcttgcgcaacctccacgacctggatgtgtccgacaaccagctggagcgagtgccacctgtgatccgaggcctccggggcctgacgcgcctgcggctggccggcaacacccgcattgcccagctgcggcccgaggacctggccggcctggctgccctgcaggagctggatgtgagcaacctaagcctgcaggccctgcctggcgacctctcgggcctcttcccccgcctgcggctgctggcagctgcccgcaaccccttcaactgcgtgtgccccctgagctggtttggcccctgggtgcgcgagagccacgtcacactggccagccctgaggagacgcgctgccacttcccgcccaagaacgctggccggctgctcctggagcttgactacgccgactttggctgcccagccaccaccaccacagccacagtgcccaccacgaggcccgtggtgcgggagcccacagccttgtcttctagcttggctcctacctggcttagccccacagcgccggccactgaggcccccagcccgccctccactgccccaccgactgtagggcctgtcccccagccccaggactgcccaccgtccacctgcctcaatgggggcacatgccacctggggacacggcaccacctggcgtgcttgtgccccgaaggcttcacgggcctgtactgtgagagccagatggggcaggggacacggcccagccctacaccagtcacgccgaggccaccacggtccctgaccctgggcatcgagccggtgagccccacctccctgcgcgtggggctgcagcgctacctccaggggagctccgtgcagctcaggagcctccgtctcacctatcgcaacctatcgggccctgataagcggctggtgacgctgcgactgcctgcctcgctcgctgagtacacggtcacccagctgcggcccaacgccacttactccgtctgtgtcatgcctttggggcccgggcgggtgccggagggcgaggaggcctgcggggaggcccatacacccccagccgtccactccaaccacgccccagtcacccaggcccgcgagggcaacctgccgctcctcattgcgcccgccctggccgcggtgctcctggccgcgctggctgcggtgggggcagcctactgtgtgcggcgggggcgggccatggcagcagcggctcaggacaaagggcaggtggggccaggggctgggcccctggaactggagggagtgaaggtccccttggagccaggcccgaaggcaacagagggcggtggagaggccctgcccagcgggtctgagtgtgaggtgccactcatgggcttcccagggcctggcctccagtcacccctccacgcaaagccctacatctaagccagagagagacagggcagctggggccgggctctcagccagtgagatggccagccccctcctgctgccacaccacgtaagttctcagtcccaacctcggggatgtgtgcagacagggctgtgtgaccacagctgggccctgttccctctggacctcggtctcctcatctgtgagatgctgtggcccagctgacgagccctaacgtccccagaaccgagtgcctatgaggacagtgtccgccctgccctccgcaacgtgcagtccctgggcacggcgggccctgccatgtgctggtaacgcatgcctgggccctgctgggctctcccactccaggcggaccctgggggccagtgaaggaagctcccggaaagagcagagggagagcgggtaggcggctgtgtgactctagtcttggccccaggaagcgaaggaacaaaagaaactggaaaggaagatgctttaggaacatgttttgcttttttaaaatatatatatatttataagagatcctttcccatttattctgggaagatgtttttcaaactcagagacaaggactttggtttttgtaagacaaacgatgatatgaaggccttttgtaagaaaaaataaaagatgaagtgtgaaaaaaaaaaaaaaaa

SEQ ID NO: 28114 - DNA, 2920 bp, Homo Sapiens
tgggggatgggagggccgtgctgctggtcgctcctcctcctccacccgctctgcccctcctggaccttgtgggccgggcagccattttgggaagagctttgttatggttgtggactagccgcctctgccgggtcgacaagctggggacgcgtcctcagacgcagcgtctagtccctggccatagctccgccgctgcccgttggtgtctcacctttaactctccttatgctgggtgaaaacaaagagtgatagattcgtgtggcctttcaaatgattgtgaagtggtggaaatggatccaaaataataagtgacttctctaccaaagcatagaagattcttcatatctccttccagtggctcaatttagattttgggaaggagcagaacaagtgaaacacagaaaactgaagagaagaaatcctcattttggacctatatttctccttgactatttcttaatatccatcctacccatcgttctaatgttttaactttgctctgaatttataaatagtaaaggccaaagacatagaatatacatttagtagctttataccaagaaatttgccttgaaagctgctgttcgtggagggaaaagtgtagcaaattcctgtctatttttattttttatttttttttaacaaagacaagatttatgtccctagattttgaaggttaaggcaaatataaatacatatctgcacactattttttagcagttgcatgagtaagagtaatgagatttgtattttaaggactttgtcatgtggatgttttggagttgactgctcagatcttttatagggctttaatatttttgatctattaccttgatgacattatttgtccacacttgagcccatctgtctttctagctatgaccttgttatgaacagtatttgcactcggtgcaaatatccatgtcttacctaattaagcaacatcatagtgccataactcaaggaagttgaatgaggtgaacatagatacagctctttccccttccccccctttttaaatgtaacaaatactttttatgttccccttccccccttccccttttcccctttccccttttggaaacgtgtcaggaaccaaatagtttaagatgagcagttgaggggactgagagagtgatcgacacagaacctggcttcttcgtgcttcatcataagtcgtgctgccggccaggttacttaagcacccttttaacaaggaaaccttgtgggagatccagctggccgactcgagttcagaaacaggaccacagaggttacactctgggatcctggccatgaggttggatgcctcaccttactgaaaggagacactggacctaaatggcgcagcatgattttgttcctgcttggctaaatttctcaacaccacagtcagctaagtcacctactgccaccttcgaaaaacacggagagcacctacccagaggagaaggtagatttggagtaagccgccgtcgacataattcctctgatggtttttttaacaatggtcccctacgaactgcaggagattcttggcaccagccctccctgttccgccatgattctgtggactctggtgtctctaagggagcatatgctggaatcacagggaacccatctggttggcatagctcttcccgaggtcatgatggcatgagccaacgtagtggaggtggcacagggaaccatcgccattggaatggcagcttccactcccggaaagggtgtgcttttcaggaaaagccacctatggagattagggaagaaaagaaagaagacaaggtggaaaagttgcagtttgaagaggaggactttccttccttgaatccagaagctggcaaacagcatcagccatgcagacctattgggacaccttctggagtatgggaaaacccgcctagtgccaagcaaccctccaagatgctagttatcaaaaaagtttccaaagatgatcctgctgctgccttctctgctgcattcacctcaccaggatctcaccatgcaaatgggaacaaattgtcatccgtggttccaagtgtctataagaacctggttcctaagcctgtaccacctccttccaagcctaatgcatggaaagctaacaggatggagcacaagtcaggatccctttcctctagccgggagtctgcttttaccagtccaatctctgttaccaaaccagtggtactggctagtggtgcagctctgagttctcccaaagagagtccctccagcaccacccctccaattgagatcagctcctctcgtctgaccaagttgacccgccgaaccaccgacaggaagagtgagttcctgaaaactctgaaggatgaccggaatggagacttctcagagaatagagactgtgacaagctggaagatttggaggacaacagcacacctgaaccaaaggaaaatggggaggaaggctgtcatcaaaatggtcttgccctccctgtagtggaagaaggggaggttctctcacactctctagaagcagagcacaggttattgaaagctatgggttggcaggaatatcctgaaaatgatgagaattgccttcccctcacagaggatgagctcaaagagttccacatgaagacagagcagctgagaagaaatggctttggaaagaatggcttcttgcagagccgcagttccagtctgttctccccttggagaagcacttgcaaagcagagtttgaggactcagacaccgaaaccagtagcagtgaaacatcagatgacgatgcctggaagtaggcatataaatgctcacagttaaatctgacccagtaaactctgtgtgtttagggagtatacaaaagaaatcgttcttttccttttcttatgttgttgaatacttcattcacaagggaaataatcatatcccaaagagagaaaaaaaaaaaaaaaa

SEQ ID NO: 28115 - DNA, 1715 bp, Homo Sapiens
aggggcgggtgccgtgctgagagcgcctgcctgtgcgccccgagcggggctgggactcttccaagatgcccacgttcgcacagagaccccggatcgcggaagctcgcgtctcgaaaggcggtctcacgccctgcccgtcctgggttcacggtttttcatcacctgcggctgtcctgcgatcgaccacagctgtgcaggaggggcaggaggtatctgttgctgcagttaccggaacctttgccaggactagtacaggaccacgggctggtagctcagggatgtctcgtctgtgagttacagctgcacgctctccaggaaagaaggaatttcctcttctctggaaaccccaccacacagctggtttctcattggtgctgcttgcccattccctgagctgtgactgccagaggagtgggaggttggtggtgcctccagcccatcaggggcaggccctgggaccgcctgggaacaggaggactatggcacaaaccgagtgagtgatgggagcaacccgcagggctctgccacatccctgtcttccttcactgacatgaaacgcagaaaaggcagctttgccacaacacaggagcacgcaccgaatgtggccgcccagggctctgtccttgaccctgttgtccaggactgtttaccaagggctgacaggcactgagtgccccgtgcacctggccagacactgcactcatgcagcggaaaggacagtgaacgagactttgtccctggcctccaaaggcttagggcgtagtggctgtcatgaggcacagtgacaagggccaggagggggacctcttagggggccatgcagtgatggaagccagaaggaatgaaggcctgcagtgaggatggagtggtcggcctgaagccatctctagcaagtggtcaggacgctgattgttctgcgcaggttggaggtaggtggtgagtctgagaaaggggccggaaagactccccagcaactgctggcaaagggtgaagggcacgttcccacaggattcaagccagctgcctttggaggggagacgggcactcagtttaggcgctcctacagcagggtcagcaagacaagcaggttgcggcaagggtctgcgcactgctgtgtaaatgtaggggcatcggggggcagaaagaccaggggagaagtgtgcatcacccttggggttaagggacagttgtctgctaggtgttgcttcctggagatggctgaaaagccagtccagtctgcagggaccaggccaccacccacctgatgtgggagcatttcccccaatccctgctgggctgctgaatctgggggacatagggaagctgaggctggtgttctgagtagtggcagagctgagccacagggcatgtctgaggtcagccccgagcaaaatggaatagggactcagggtgggtcaggtaactggaaagcgggcactgtgcacgcagcccttgaggggagccagggtgggtggggatcccccactgtgtgcagaaggcagcagccttggaagcagggtgtgctcctcggtgtggtcgctcgataccagaaaatgactctaaaaactgaagagtgtttgagtttcattcacacaaaacatggacatcatctgtgaggctctgtcccagagagacagggccatccctcatgtctgttattgggttgtagataaacaaaagtataaatcaaacaaactgcaaaaaaaaaaaaaaaa

SEQ ID NO: 28116 - DNA, 2293 bp, Homo Sapiens
agccctagcagctcgcgatgtgcttcagcagagcagacgctgcggataactacccttttggaacatgtcaacagaggaaactttttcctcacttccatcccccgaatttgattgggaacaagtttgtccctcttaggggatcaccccacagagggcctgggtgttatttttcagatggatatggcttggcatacgacttatctaagatcccaaccagtataaaaggatatactttgggagccagaacagctgtgaggtttaagccaatacagaaggaaatgacacctcatgcaggcaggtaccagaaagtaagtcctcagcaggaaaaacacaaacaaaattttgctccatttaatgtcttggtgcctcgatttaagaactacccaaaggacacttactatcccagccctggtgcatacaacccagagaagaagccaccgccaaaaattgcctggccaatgaaatttggatctccagactgggctcaggttccatgtctacagaaaagaaccctaaaagctgagctgtccacagacaaagactttagaaagcatcggaaccgtgtggcctacctaagcctgtattataattgagcggctgtgactaccttcacgtgctcctcttatacacagactctccaggactgaggacagagctgctcttcttcttctacgttactgtggccctcttgtctggcagcctggagcccagggagggacaggggcttatagctgctgtatgagaacataaagactagtgcacagtgctatctccatctactgacttgtggtgtacacgtgcatgtctgggtctgtgggtttctattgggtgctgagttgggtgatttcattttagtgaaatatttgtgggcccctgctctctagttctaattcccaggagccaattttatatattctaccactagccctggtcataggaggctgttagcctatacatgtcaagggtttggatgggatttgggcttgctagatacagaaaacacttaaggcagattaaaacatgtattggagctctcccaattgtgttgctcagtgtggagtgggaaggtcttgatttggttgactttcccagattgacataaaactcaaaaaccaaaaaattgcccctttcctatgacatcatccatttagtctgtgagtcaacatatatactgaggtcctactatgtgttgagcagagcagtaagcactggggatatggcaggaatcaaaataaacttatctactaagtccttgggcctggcctgaagtcagaggaggactccccagggcagctaggggattgggtctgccctccaatctgaatgaccccctagaaccttacaagtcattctggggttataaagatcataacatttatagccccagactgacttgtaagcagctgcatttaaagtacttactcagacactcaggcctgagagatagacccctttctttccagcactagctgaaataatcaagtatatagtttgttcaggattggcactaaatgtgatttaatcttttaataaaagggtccttttgtacccacttaggcttcttcgtaattaccagaaaggtgataagcctgcatgtgtctggacaccaaagattgagaagctgccagtggctgcaagagagcctactgtaaccctcatggccaccccctgatgagtgttacctggggaaagggctagcaagaggtgaagcctcctggtcatatgatgctgggggtgcctaattccttaaaggccaaggtcttctgaaataataatggtgaaggacagaaaagtctttatgagaaatcacataggatatattaagataatgataaagatacctcagcaagaacatacctaatatatacacttcttttaatctgatgacttaatgatttctgttatcaagaagtatttatgacttgagataagtcaggattaactgttatcacctctcctgtacacctccctcctttttctcctttgtacccacatgtgcagattttttcagaggtgacaatttagcatttaatgtttttttttctgcttcaagttcttaggtccctttggaggatattgatgggggtggaggtggggatagaacatctttcacactgtttggtacagagatgctcaaagcttttcccagggaaaggaactctctaaaatagtaatctgatttgatgaaagataaaattttaatatagcttcagttaaccttcaggatactttaaatgctacattgtatataaaagtaataaagtacaaatgaacacgaaaaaaaaaaaaaaaa

SEQ ID NO: 28117 - DNA, 2293 bp, Homo Sapiens; identical to SEQ ID NO: 28116

SEQ ID NO: 28118 - DNA, 4668 bp, Homo Sapiens
cccagcactctccgtgacagcgcctcctgactcagcccaggaccggcttcttctcacgacctgctggagactggacgcccacacctgacccggaactcggaggcgtgcttcctccacccgccggctagcagccccgggccctgagctcccgccgacgccgctggggggcccgacaggcccctcggcgctgatgctgagtgggatcgagggcccggggcggcggcggagtacgggcctctggcgccttaggccagccgcaggtgtcggttcttaggctctccaggctcgctagctcccgccccggcttggatgggtctccctgcgccataaatgtggctgctgaggcggcggtggccgtggcccgtcgcgctgctgctgcggcgctccaagttcatctccgccccggggctctcctgccccacctcggggctgccgccacccgctccttatcccctggccctggccttgcagcgtggcgacaatggacaagatcctggagggccttgtgagttcctcgcatcccctgcccctcaagcgggtgattgtgcggaaggtggtggaatcggcggagcactggctagacgaggcgcagtgcgaggccatgtttgacctgacgacccggctcatcctggagggccaggaccctttccagcggcaggtggggcaccaggtgctggaggcctacgcacgataccaccggccagagttcgagtccttcttcaacaagaccttcgtgttgggcctccttcatcagggctaccactctctggacaggaaggatgtagccatcctggactacattcacaacggcctgaagctgattatgagctgtccgtcggtgctggatctctttagcctcctgcaggtagaggtgttacggatggtgtgtgagaggccggagccgcagctctgtgcccgactgagcgaccttctgaccgactttgtgcaatgcatccccaaggggaaattgtccatcacgttctgtcaacagctggttcgaacgataggccatttccagtgcgtgtccacccaggaaagagagctgcgggaatatgtctcccaggtgacaaaagtgagtaacttgctgcagaacatctggaaggccgagcctgccacactactgccttccctgcaagaagtttttgcaagcatctcttccacagatgcatcatttgaaccttctgtagcattggcaagccttgtgcagcatattcctcttcagatgattacagttctcatcaggagccttactacggatccaaatgtaaaagatgcaagtatgacccaagccctttgcagaatgattgactggctatcctggccattggctcagcatgtggatacatgggtaattgcactcctgaaaggactggcagctgtccagaagtttactattttgatagatgttactttgctgaaaatagaactggtttttaatcgactttggtttcctcttgtgagacctggtgctcttgcagttctttctcacatgctgcttagctttcagcattctccagaggcgttccatttgattgttcctcatgtggttaatttggttcattctttcaaaaatgatggtctgccttcaagtacagccttcttagtacaattaacagaattgatacactgtatgatgtatcattattctggatttccagatctctatgaacctattctggaggcaataaaggattttcctaagcccagtgaagagaagattaagttaattctcaatcaaagtgcctggacttctcaatccaattctttggcgtcttgcttgtctagactttctggaaaatctgaaactgggaaaactggtcttattaacctaggaaatacatgttatatgaacagtgttatacaagccttgtttatggccacagatttcaggagacaagtattatctttaaatctaaacgggtgcaattcattaatgaaaaaattacagcatctttttgcctttctggcccatacacagagggaagcatacgcacctcggatattctttgaggcttccagacctccatggtttactcccagatcacagcaagactgttctgaatacctcagatttctccttgacaggctccatgaagaagaaaagatcttgaaagttcaggcctcacacaagccttctgaaattctggaatgcagtgaaacttctttacaggaagtagctagtaaagcagcagtactaacagagacccctcgtacaagtgacggtgagaagactttaatagaaaaaatgtttggaggaaaactacgaactcacatacgttgtttgaactgcaggagtacctcacaaaaagtggaagcctttacagatctttcgcttgccttttgtccttcctcttctttggaaaacatgtctgtccaagatccagcatcatcacccagtatacaagatggtggtctaatgcaagcctctgtacccggtccttcagaagaaccagtagtttataatccaacaacagctgccttcatctgtgactcacttgtgaatgaaaaaaccataggcagtcctcctaatgagttttactgttctgaaaacacttctgtccctaacgaatctaacaagattcttgttaataaagatgtacctcagaaaccaggaggtgaaaccacaccttcagtaactgacttactaaattattttttggctccagagattcttactggtgataaccaatattattgtgaaaactgtgcctctctgcaaaatgctgagaaaactatgcaaatcacggaggaacctgaataccttattcttactctcctgagattttcatatgatcagaagtatcatgtgagaaggaaaattttagacaatgtatcactgccactggttttggagttgccagttaaaagaattacttctttctcttcattgtcagaaagttggtctgtagatgttgacttcactgatcttagtgagaaccttgctaaaaaattaaagccttcagggactgatgaagcttcctgcacaaaattggtgccctatctattaagttccgttgtggttcactctggtatatcctctgaaagtgggcattactattcttatgccagaaatatcacaagtacagactcttcatatcagatgtaccaccagtctgaggctctggcattagcatcctcccagagtcatttactagggagagatagtcccagtgcagtttttgaacaggatttggaaaataaggaaatgtcaaaagaatggtttttatttaatgacagtagagtgacatttacttcatttcagtcagtccagaaaattacgagcaggtttccaaaggacacagcttatgtgcttttgtataaaaaacagcatagtactaatggtttaagtggtaataacccaaccagtggactctggataaatggagacccacctctacagaaagaacttatggatgctataacaaaagacaataaactatatttacaggaacaagagttgaatgctcgagcccgggccctccaagctgcatctgcttcatgttcatttcggcccaatggatttgatgacaacgacccaccaggaagctgtggaccaactggtggagggggtggaggaggatttaatacagttggcagactcgtattttgatcctgagagagtccaaaatgcactggtcacgaaacgtctaatactatgactgttaaaatgtcagactataacaaatatctatcttttatttttcattagacccttatacttcaagagaacacactcagtgcttgtttttattttcttgacacatttattaacaaaatgcatcatggaaaaaaaatctacctcttaaaattccatttgcttttatggttagacatgcttgaccaaaaatgttcagaagaaaatatgtacctggtccctaattaagctgcgttaaatttggtagaagcatttaaatggtctatcttcagttttactgaacaaaaaatgtaatttatttagcattctttataaaagaattgatgctagaggtaaaaaaaaatacttgtttttaaaaaatcctttacgtcttgtgtaattaccccattattaaattcaagtccttgaaaatcaactagagattataaagtctctaaagaaggcaataacaaaatttatcaagatatagtacttttcagtttttgtttagtgtcttcagcatcactgtgtctgtatttcaagtacaaatgtttttaaaaaggattctttatacatatgtgctgaattgattttaagaaagttgcatgatcctgtaggagcaacatttttacctaaaaaatgctaactttatagtatttctaattgttcaaggattttaaaattctatttcagggagtatatcttctgtggttttgaaggaggtgagttctgtatgtgccttgcagtactgtaattcaaaaataggaatctttggctgcaaaattttaatgaaatgttaggaagtaattttcgtgctaacattaaaattataactttttgaaaggtaatagattttccagaagtaaaatctgatggttctaaatcaatcaatgtgatagttcatttttaactcttagaagaattcagaggaaattaacccagctaagtaaaaaatctgtcttgattttgttacttattcctcagaatattaaacattgatcacatatttttagagttttaaaaaaaaaaaaaaa

SEQ ID NO: 28119 - DNA, 5569 bp, Homo Sapiens
gagtccgccgccaacgcgcaggtgctagcggccccttcgccctgcagcccctttgcttttactctgtccaaagttaacatgtcactgaaaaacgagccacgggtaaatacctctgcactgcagaaaattgctgctgacatgagtaatatcatagaaaatctggacacgcgggaactccactttgagggagaggaggtagactacgacgtgtctcccagcgatcccaagatacaagaagtgtatatccctttctctgctatttataacactcaaggatttaaggagcctaatatacagacgtatctctccggctgtccaataaaagcacaagttctggaagtggaacgcttcacatctacaacaagggtaccaagtattaatctttacactattgaattaacacatggggaatttaaatggcaagttaagaggaaattcaagcattttcaagaatttcacagagagctgctcaagtacaaagcctttatccgcatccccattcccactagaagacacacgtttaggaggcaaaacgtcagagaggagcctcgagagatgcccagtttgccccgttcatctgaaaacatgataagagaagaacaattccttggtagaagaaaacaactggaagattacttgacaaagatactaaaaatgcccatgtatagaaactatcatgccacaacagagtttcttgatataagccagctgtctttcatccatgatttgggaccaaagggcatagaaggtatgataatgaaaagatctggaggacacagaataccaggcttgaattgctgtggtcagggaagagcctgctacagatggtcaaaaagatggttaatagtgaaagattcctttttattgtatatgaaaccagacagcggtgccattgccttcgtcctgctggtagacaaagaattcaaaattaaggtggggaagaaggagacagaaacgaaatatggaatccgaattgataatctttcaaggacacttattttaaaatgcaacagctatagacatgctcggtggtggggaggggctatagaagaattcatccagaaacatggcaccaactttctcaaagatcatcgatttgggtcatatgctgctatccaagagaatgctttagctaaatggtatgttaatgccaaaggatattttgaagatgtggcaaatgcaatggaagaggcaaatgaagagatttttatcacagactggtggctgagtccagaaatcttcctgaaacgcccagtggttgagggaaatcgttggaggttggactgcattcttaaacgaaaagcacaacaaggagtgaggatcttcataatgctctacaaagaggtggaactcgctcttggcatcaatagtgaatacaccaagaggactttgatgcgtctacatcccaacataaaggtgatgagacacccggatcatgtgtcatccaccgtctatttgtgggctcaccatgagaagcttgtcatcattgaccaatcggtggcctttgtgggagggattgacctggcctatggaaggtgggacgacaatgagcacagactcacagacgtgggcagtgtgaagcgggtcacttcaggaccgtctctgggttccctcccacctgccgcaatggagtctatggaatccttaagactcaaagataaaaatgagcctgttcaaaacctacccatccagaagagtattgatgatgtggattcaaaactgaaaggaataggaaagccaagaaagttctccaaatttagtctctacaagcagctccacaggcaccacctgcacgacgcagatagcatcagcagcattgacagcacctccagttattttaatcactatagaagtcatcacaatttaatccatggtttaaaaccccacttcaaactctttcacccgtccagtgagtctgagcaaggactcactagacctcatgctgataccgggtccatccgtagtttacagacaggtgtgggagagctgcatggggaaaccagattctggcatggaaaggactactgcaatttcgtcttcaaagactgggttcaacttgataaaccttttgctgatttcattgacaggtactccacgccccggatgccctggcatgacattgcctctgcagtccacgggaaggcggctcgtgatgtggcacgtcacttcatccagcgctggaacttcacaaaaattatgaaatcaaaatatcggtccctttcttatccttttctgcttccaaagtctcaaacaacagcccatgagttgagatatcaagtgcctgggtctgtccatgctaacgtacagttgctccgctctgctgctgattggtctgctggtataaagtaccatgaagagtccatccacgccgcttacgtccatgtgatagagaacagcaggcactatatctatatcgaaaaccagtttttcataagctgtgctgatgacaaagttgtgttcaacaagataggcgatgccattgcccagaggatcctgaaagctcacagggaaaaccagaaataccgggtatatgtcgtgataccacttctgccagggttcgaaggagacatttcaaccggcggaggaaatgctctacaggcaatcatgcacttcaactacagaaccatgtgcagaggagaaaattccatccttggacagttaaaagcagagcttggtaatcagtggataaattacatatcattctgtggtcttagaacacatgcagagctcgaaggaaacctagtaactgagcttatctatgtccacagcaagttgttaattgctgatgataacactgttattattggctctgccaacataaatgaccgcagcatgctgggaaagcgtgacagtgaaatggctgtcattgtgcaagatacagagactgttccttcagtaatggatggaaaagagtaccaagctggccggtttgcccgaggacttcggctacagtgctttagggttgtccttggctatcttgatgacccaagtgaggacattcaggatccagtgagtgacaaattcttcaaggaggtgtgggtttcaacagcagctcgaaatgctacaatttatgacaaggttttccggtgccttcccaatgatgaagtacacaatttaattcagctgagagactttataaacaagcccgtattagctaaggaagatcccattcgagctgaggaggaactgaagaagatccgtggatttttggtgcaattccccttttatttcttgtctgaagaaagcctactgccttctgttgggaccaaagaggccatagtgcccatggaggtttggacttaagagatattcattggcagctcaaagacttccaccctggagaccacactgcacacagtgacttcctggggatgtcatagccaaagccaggcctgacgcattctcgtatccaacccaaggaccttttggaatgactggggagggctgcagtcacattgatgtaaggactgtaaacatcagcaagactttataattccttctgcctaacttgtaaaaagggggctgcattcttgttggtagcatgtactctgttgagtaaaacacatattcaaattccgtataccaaaatccatttcctttgtaacaagaatttaccagtaactgtgatctaggttgccaaaagttgtctgaatctccttattcttctctgatcttcatttatgcagccaatgtctagctggacctgccctcatcttgcagttcatacaggcactgtttgagagattgtttattattagatgttgtaatgctgcttcaagattcttcatggttacatgggatgcccctgctcatctggtcctgaagtagtaacattcacccaaatgaggatatagtcattattccttttcagtcactgtacgaacacggcagactttagcctacacagtagactgtgttaggcacttctggtaacattgacactgtatcttgacaccactaagcaacaggaaggaataaattccaatattgagacagagatttatttcattttgctcccaaaggcactgacaacatgagtccttgtgattaggcccacctgatcaaatgtaaaaacatgcatgggatatttgattacgtaacaaccagctaaaactgagagcacacagccttcggaaacccccaaggtgtcgaggaggatcagatccagataagagaagatgattccttctagtcctgtaaaatttcctgtcatccttagctgctgggttgattgaaatttgatctctacatttcaaaatcaaactagtgaatacagtttgtctttcaagagaatcagaggcatcgtaactcctaccaagttagtaagtatgagtctaaccttgtttgacattcaggtcttctgctacattatcttctttgagaaaaattaattgattataaaatatgtgctacttcacttacattattaaatatgtattaacgcctctcaccagggcttccagtgaagttacaatgccctagtctgtgaattagtctggaaacgtgtttttccttttcggatgttagagtaccctttgataaactaaattttactaagctgaacaactctgacagtctaaagagctaatgtgggttaccaaaaggcctgtacctgtaaaacaaaatgcaggtgtaatgattatacatgtctatggattacctggacatactctcatttgggttgttcttcaaagaagcaagcagccgatccctgttttcataaagctaatacttcagttggaaaaattaaacaggagcacaaagtcagggataggggttagcagaagagagaaatagtgtcacatcaagggcaggatctcatagctagggaacatttcacaaataaggtgagattttgtaaccaataataaaaatgaatgtttttataagtaaataacttatttttcatatggctaaagatggtaaaatgacttcattctatagccattgtaaataagaatttgctattgatgaaagaagttcagattggcatttgaagtattgagtgtatgggatctctaaggatttcttagattttatatttaaatattttttaaaccttagaggagtcaacaaactggctcttgattttcagcaccctactctcatgaaaaaagcctgaaaggaccctttcccttataagtaatttaatccaatttctccccattttatagatgaggaaactgaggctcagatcagatgagaactcacttaaatccactcaatgtgtagatggtagagctgggactagcaacattgctgcagcccattgttggcctctctcttcactttatcattgcccaagaatgaggatatgcagtaaacagaattcaggcaagatacctctaagctgttttgaaccctctgatattttgtatttatgtgtttgtctgtctccccctactagaatgtaagctccatggggcagggacttcactgtattttgttcatagtgtatccccagagcctggaccagtgcttggcacataggagatggcaataaatgcttgtagaattaataaacaaggtgaaggagagagctaatgaaatgaaaaaaaaaaaaaaaaaa

SEQ ID NO: 28120 - DNA, 1970 bp, Homo Sapiens
caaacgcgccgactacagaggctggacgtaagcttagcggtggcgcgcgtgcgcagcgccggcccgagttgccaaaacaaaggggatttggtgatggaggctttgttagaaggaatacaaaatcgagggcatggtgggggatttttgacatcttgtgaagcagaactacaggagctcatgaaacagattgacataatggtggctcataaaaaatctgaatgggaaggacgtacacatgctctagaaacttgcttgaaaatccgtgaacaggaacttaagagtcttaggagtcagttggatgtgacacataaggaggttggaatgttgcatcagcaggtagaagaacatgaaaaaatcaagcaagagatgaccatggaatataagcaggagttgaagaaactacatgaagaattatgcatactgaagagaagctatgaaaagcttcagaaaaagcaaatgagggaattcagaggaaataccaaaaatcacagggaagatcggtctgaaattgagaggttaactgcaaaaatagaggaattccgtcagaaatcgctggactgggagaagcaacgcttgatttatcagcaacaggtatcttcactggaggcacaaaggaaggctctggctgaacaatcagagataattcaggctcagcttgtcaatcggaaacagaaattagagtctgtggaactttctagccaatcagaaattcaacacttaagcagtaaactggagcgggctaatgacactatctgtgccaatgagttggaaatagagcgcctcaccatgagggtcaatgacttggttggaaccagtatgactgtcctacaggagcagcagcaaaaagaagaaaaattgagggaatctgaaaaactattagaggctctgcaggaagaaaagagagaattgaaggcagctcttcagtctcaagaaaatctcatacatgaggccagaatacaaaaggagaagttacaagaaaaagtaaaggcaactaacactcaacatgctgtagaagctataaggccacgggaagaatctctggcagaaaagaagtacacctctcaagggcagggggacttagacagtgtgctctcccagttgaattttacccatactagtgaggaccttctgcaggcagaggtgacttgtcttgaaggcagtttggaatctgtgagtgcaacgtgtaaacagctgagccaagaactaatggaaaaatatgaagaactgaagaggatggaagcacataacaatgaatacaaagcagagattaagaagttgaaagaacagattttacagggtgaacaaagttacagttctgcactagaaggaatgaagatggaaatctcccatctaactcaggagttacatcagcgagatatcactattgcttccaccaaaggttcttcctcagacatggaaaagcgactcagagcagagatgcaaaaggcagaagacaaagcagtagagcataaggagattttggatcagctggagtcactcaaattagaaaatcgtcatctttctgaaatggtgatgaaattggaattgggtttacatgagtgttccttgcctgtatctccccttggttcaatagctaccagatttttggaagaggaggaactgaggtctcatcacattctagagcgcttggatgcccatattgaagaactaaaaagagagagtgaaaagacagtgagacaattcacagccttaaagtagcctcttaaaaaaatcacaatcttggaaataaaaataaacaccaaagagttactgtcatctgaagtagcagctctttaaaaacatgaagagataaaattataaaaatgatacatctaaagcagtggtgaagaaagctgaaaaactgatacttttgataggcattttctctgcactggtttgtttaaaggacttcttccagcaataagttgaaagaataaaccactttgctagacaaaaaaaaaaaaaaaaaa

SEQ ID NO: 28121 - DNA, 1812 bp, Homo Sapiens
agctaaccttttgtctcttctccgccctccctcgccgcctatgcaggaccgcacccccagcgcctccccggacctgggcaagcactcgcccctggcattgctggccgccacctgtagccgcatcggccagccgggcgcggcggcgcccccggacttcctgcaggtgccctacgaccccgcgctgggctcaccctccaggctcttccacccgtggaccgccgacatgccggcgcactcgccaggcgcactgccgcccccgcatcccagcttggggctgacgccgcagaagacgcacctgcagccgtccttcggggctgcgcacgagcttccccttacaccccccgccgacccctcgtacccctacgagttctcgccggtcaagatgctgccctcgagcatggcggctctgcccgccagctgcgcgcccgcctacgtgccctacgcggcgcaggccgcgctgccgccaggctactccaacctgctgcctccgccgccgccaccgcccccgccgcccacctgccgccagttgtcacccaacccggcccccgacgacctcccgtggtggagcatcccgcaggcgggcgccgggccgggggcctccggggttccgggaagcggcctctccggcgcctgtgccggggccccccacgcgccccgcttccccgcctctgcggccgctgctgctgcggccgccgccgccctacaaagaggcctggtgttgggcccgtcggactttgcgcagtaccagagccagatcgccgcgctgctgcagaccaaggcccccctggcggccacggccaggaggtgccgccgctgccgctgtcccaactgccaggcggcgggcggcgcccccgaggcggagccggggaagaagaagcagcacgtgtgccacgtgccgggctgcggcaaggtgtacgggaagacgtcgcacctgaaggcgcacctgcgctggcacacgggcgagcgacccttcgtgtgcaactggctcttctgcgggaagagcttcacgcgctcggacgagctgcagcggcacctgcggactcacacgggcgagaagcgctttgcctgtcccgagtgcggcaagcgcttcatgcgcagcgaccacctcgcgaagcacgtcaagactcaccagaataagaagctcaaagtcgctgaggccggggttaagcgggaggacgcgcgggacctgtgagccctcccggaggtggacccccttcccagcacctctgcgagagatccggggacctgtgggcagctggcggaggggagactcagcagacggaccctctccgttgcctgcctcccaaaatggagccaggcttccaacttccgctgccttcggacatagggacccagttcccaggagcggggaggtagggttggggctggggcatttggattgtaattgggagctctgccgtacgccagggcggttccaaactctaaaccgttcccaccgtcagggagacctacagtttcgggggaccaccctggtctggccttgtatataggaaatgctgctgaactgaatagaaaggaacttgggagatttgaaacagtgctcgggttttcgctaggaccggtttgggctttgtacaggttatttaatagctttgttaaagataattataataattataacattaataaaaatgttgcttttgtcttcagctccatgcagagctacagcatgatatgtctctgtaaagtgatcagcagttgcagcgtgaaaataaatactttaactcaggggtcactacaggaagaccccgttgaaaaaaaaaaaaaaaaaaaaaaaaaaaaaaaaaaaaa

SEQ ID NO: 28122 - DNA, 3456 bp, Homo Sapiens
atggcggcagccgttctgagtgggccctctgcgggctccgcggctggggttcctggcgggaccgggggtctctcggcagtgagctcgggcccgcggctccgcctgctgctgctggagagtgtttctggtttgctgcaacctcgaacggggtctgccgttgctccggtgcatcccccaaaccgctcggccccacatttgcccgggctcatgtgcctattgcggctgcatgggtcggtgggcggggcccagaacctttcagctcttggggcattggtgagtctcagtaatgcacgtctcagttccatcaaaactcggtttgagggcctgtgtctgctgtccctgctggtaggggagagccccacagagctattccagcagcactgtgtgtcttggcttcggagcattcagcaggtgttacagacccaggacccgcctgccacaatggagctggccgtggctgtcctgagggacctcctccgatatgcagcccagctgcctgcactgttccgggacatctccatgaaccacctccctggccttctcacctccctgctgggcctcaggccagagtgtgagcagtcagcattggaaggaatgaaggcttgtatgacctatttccctcgggcttgtggttctctcaaaggcaagctggcctcattttttctgtctagggtggatgccttgagccctcagctccaacagttggcctgtgagtgttattcccggctgccctctttaggggctggcttttcccaaggcctgaagcacaccgagagctgggagcaggagctacacagtctgctggcctcactgcacaccctgctgggggccctgtacgagggagcagagactgctcctgtgcagaatgaaggccctggggtggagatgctgctgtcctcagaagatggtgatgcccatgtccttctccagcttcggcagaggttttcgggactggcccgctgcctagggctcatgctcagctctgagtttggagctcccgtgtccgtccctgtgcaggaaatcctggatttcatctgccggaccctcagcgtcagtagcaagaatattagcttgcatggagatggtcccctgcggctgctgctgctgccctctatccaccttgaggccttggacctgctgtctgcactcatcctcgcgtgtggaagccggctcttgcgctttgggatcctgatcggccgcctgcttccccaggtcctcaattcctggagcatcggtagagattccctctctccaggccaggagaggccttacagcacggttcggaccaaggtgtatgcgatattagagctgtgggtgcaggtttgtggggcctcggcgggaatgcttcagggaggagcctctggagaggccctgctcacccacctgctcagcgacatctccccgccagctgatgcccttaagctgcgtagcccgcgggggagccctgatgggagtttgcagactgggaagcctagcgcccccaagaagctaaagctggatgtgggggaagctatggccccgccaagccaccggaaaggggatagcaatgccaacagcgacgtgtgtgcggctgcactcagaggcctcagccggaccatcctcatgtgtgggcctctcatcaaggaggagactcacaggagactgcatgacctggtcctccccctggtcatgggtgtacagcagggtgaggtcctaggcagctccccgtacacgagctcccgctgccgccgtgaactctactgcctgctgctggcgctgctgctggccccgtctcctcgctgcccacctcctcttgcctgtgccctgcaagccttctccctcggccagcgagaagatagccttgaggtctcctctttctgctcagaagcactggtgacctgtgctgctctgacccacccccgggttcctcccctgcagcccatgggccccacctgccccacacctgctccagttccccctcctgaggccccatcgcccttcagggccccaccgttccatcctccgggccccatgccctcagtgggctccatgccctcagcaggccccatgccttcagcaggccccatgccctcagcaggccctgtgccctcggcacgccctggacctcccaccacagccaaccacctaggcctttctgtcccaggcctagtgtctgtccctccccggcttcttcctggccctgagaaccaccgggcaggctcaaatgaggaccccatccttgcccctagtgggactcccccacctactatacccccagatgaaacttttggggggagagtgcccagaccagcctttgtccactatgacaaggaggaggcatctgatgtggagatctccttggaaagtgactctgatgacagcgtggtgatcgtgcccgaggggcttccccccctgccacccccaccaccctcaggtgccacaccaccccctatagcccccactgggccaccaacagcctcccctcctgtgccagcgaaggaggagcctgaagaacttcctgcagccccagggcctctcccgccacccccacctccgccgccgcctgttcctggtcctgtgacgctccctccaccccagttggtccctgaagggactcctggtgggggaggacccccagccctggaagaggatttgacagttattaatatcaacagcagtgatgaagaggaggaggaagaggaagaagaggaagaagaagaagaggaagaagaggaagaggaggaagactttgaggaagaggaagaggatgaagaggaatattttgaagaggaagaagaggaggaagaagagtttgaggaagaatttgaggaagaagaaggtgagttagaggaagaagaagaagaggaggatgaggaggaggaagaagaactggaagaggtggaagacctggagtttggcacagcaggaggggaggtagaagaaggtgcacctccacccccaaccctgcctccagctctgcctccccctgagtctcccccaaaggtgcagccagaacccgaacccgaacccgggctgcttttggaagtggaggagccagggacggaggaggagcgtggggctgacacagctcccaccctggcccctgaagcgctcccctcccagggagaggtggagagggaaggggaaagccctgcggcagggccccctccccaggagcttgttgaagaagagccctctgctcccccaaccctgttggaagaggagactgaggatgggagtgacaaggtgcagcccccaccagagacacctgcagaagaagagatggagacagagacagaggccgaagctctccaggaaaaggagcaggatgacacagctgccatgctggccgacttcatcgattgtccccctgatgatgagaagccaccacctcccacagagcctgactcctagccatcttctgcaccccactctttgtttccaataaagttatgtccttaaaaaaaaaaaaaaaaa

SEQ ID NO: 28123 - DNA, 1936 bp, Homo Sapiens
gccagccacggctggttctggcgctggcagaagcgccacggcatctccagccagcgcttctacggcgaggccgggcccccagccccgagccccgcgcccggcccgcccgtcaaggaggagcccgcgctgccctccggcgccggccccctgcccgaccgcgccccggccccgccgcccccggccgagggcggctacggggacgagcagatttacagcgccagcgtcaccggcctctactggaagctgcttccggagcaggctgcgcccccgggcgcaggggaccccagggcggggggctgtggccggcgctggcggggcgaccgcgtaacggtgctgctggccgcaaacctgaccggcagccacaagctgaagccgctggtcatcgggcggctgccggacccgcccagcctgcgccaccacaaccaggacaagttcccggcctcctaccgctacagccccgacgcctggctcagccgcccgctgctgcggggctggttctttgaggaatttgtcccaggcgtcaaacgctacctgcgccgaagctgcctgcagcagaaggccgtgctgctggtggcccacccgccctgcccaagcccagctgccagtatgcccgccctggacagcgaggatgcccccgtgcggtgcaggccggagcccctcggtcccccggaggagctgcagacaccggatggcgctgtgcgggtgctgttcctgtccaaaggcagcagccgggcacatatccccgcaccgctggagcagggcgtggtggccgccttcaaacagctgtacaagcgcgagctgctgcgactggctgtgtcctgcgccagcggctccccgctggacttcatgcgcagcttcatgctcaaggacatgctctacctggctggcctctcctgggacctggtgcaggcgggcagcattgagcgctgctggctgctgggcctgcgggctgccttcgagccccggcccggcgaggacagtgctgggcagccggcccaggccgaggaagccgccgagcacagcagggtgctcagcgacctcacccacctggcggctctggcctacaagtgcctggctccggaggaggttgcggagtggctgcacctggacgatgatgggggtccgcccgagggctgcagggaggaggtgggcccagccctgccccctgcagcgcctccggccccagccagtctgccctctgccattgggggcggagaggacgaggaggaggccaccgactatggagggacctcagtgccgactgccggggaggccgtgcgggggctagaaacagctctgcggtggctggagaaccaggaccccagagaggtggggccactgaggctggtgcagttgcgctcactcatcagcatggcccggaggctggggggcatcgggcataccccagcaggcccctatgacggtgtgtgaccaggccagcccagtgacctttctcctgctgcacttggagggaggggacatacacacagtctcccatctctcctcccctccccctggggtggcccaccgcatgggtacagggggttccaggaatccaaatccagcatggcttggaggagctctgttggtgagaggtcgccctgcctcactggcaccctgggggcacagctggaagagaggcctggcccatgctcctctcagggcaggcacatgtacggggcatacaaggcacagcgcctgttggaacaggtggctgtgttcctgctctggcccccgtgcggctgggcctccgcccctgcaccagtcacatgcactggacgagggccgaaactcctgtctgctatcgagccctggtgctatgtggccccggagccacagcacaatcatctcagtggcgaagcacaccacttgattctatttttttttaacacattaaatctgtttttaaagataaaaaaaaaaaaaaaaaaaaaaa

SEQ ID NO: 28124 - DNA, 3244 bp, Homo Sapiens
agagttgctgggagtgcgcgcggtcggatcacaaggcggcggcggaggaggcccagcccgctgcggcggtgcctccttccttcctccttccctcgcgctctctctttcgcccgcccgcgccttccctgcccgcctgcgtcaccgcggccgccatggctgagaatggcgagagcagcggccccccgcgcccctcccgcggccctgctgcggcccaaggctcggctgctgccccggctgagcctaaaatcatcaaagtcacggtgaagactcccaaagagaaagaggagttcgcggtgcccgagaacagctcggttcagcagtttaaggaagcgatttcgaaacgcttcaaatcccaaaccgatcagctagtgctgatttttgccggaaaaatcttaaaagatcaagataccttgatccagcatggcatccatgatgggctgactgttcaccttgtcatcaaaagccagaaccgacctcagggccagtccacgcagcctagcaatgccgcgggaactaacactacctcggcgtcgactcccaggagtaactccacacctatttccacaaatagcaacccgtttgggttggggagcctgggaggacttgcaggccttagcagcctgggcttgagctcgaccaacttctctgagctccagagccagatgcagcagcagcttatggccagccctgagatgatgatccaaataatggaaaatccctttgttcagagcatgctttcgaatcccgatctgatgaggcagctcattatggctaatccacagatgcagcaattgattcagagaaacccagaaatcagtcacctgctcaacaacccagacataatgaggcagacactcgaaattgccaggaatccagccatgatgcaagagatgatgagaaatcaagacctggctcttagcaatctagaaagcatcccaggtggctataatgctttacggcgcatgtacactgacattcaagagccgatgctgaatgccgcacaagagcagtttgggggtaatccatttgcctccgtggggagtagttcctcctctggggaaggtacgcagccttcccgcacagaaaatcgcgatccactacccaatccatgggcaccaccgccagctacccagagttctgcaactaccagcacgaccacaagcactggtagtgggtctggcaatagttccagcaatgctactgggaacaccgttgctgccgctaattatgtcgccagcatctttagtaccccaggcatgcagagcctgctgcaacagataactgaaaacccccagctgattcagaatatgctgtcggcgccctacatgagaagcatgatgcagtcgctgagccagaatccagatttggctgcacagatgatgctgaatagcccgctgtttactgcaaatcctcagctgcaggagcagatgcggccacagctcccagccttcctgcagcagatgcagaatccagacacactatcagccatgtcaaacccaagagcaatgcaggctttaatgcagatccagcaggggctacagacattagccactgaagcacctggcctgattccgagcttcactccaggtgtgggggtgggggtgctgggaaccgctataggccctgtaggcccagtcacccccataggccccataggccctatagtcccttttacccccataggccccattgggcccataggacccactggccctgcagccccccctggctccaccggctctggtggccccacggggcctactgtgtccagcgctgcacctagtgaaaccacgagtcctacatcagaatctggacccaaccagcagttcattcagcaaatggtgcaggccctggctggagcaaatgctccacagctgccgaatccagaagtcagatttcagcaacaactggaacagctcaacgcaatggggttcttaaaccgtgaagcaaacttgcaggccctaatagcaacaggaggcgacatcaatgcagccattgaaaggctgctgggctcccagccatcgtaatcacatttctgtacctggaaaaaaaatgtatcttatttttgataatggctcttaaatctttaaacacacacacaaaatcgttctttactttcattttgattcttttaaatctgtctagttgtaagtctaatatgatgcattttaagatggagtccctccctcctacttccctcactccctttctcctttgcttatttttcctaccttcccttcctcttgtctccccactccctccctctttgtttccttccttccttatttcctttagtttccttccttagccgttttgagtggtgggaatcaatgctgtttcactcaaaagtgttgcatgcaaacacttctctttattctgcatttattgtgatttttggaaacaggtatcaaccttcacagttgggtgaacaagtgttgtcctacagatgtccaatttatttgcatttttaaacattagcctatgatagtaatttaatgtagaatgaagatattaaaaacagaagcaaattatttgaagctctctaatttgtggtacgatattgcttattgtgactttggcatgtatttttgctagcaaaatgctgtaagatttataccattgatcttttttgctatatttgtatacagtacagtaagcacaattggcactgtacatctaaaaatattacagtagaatctgagtgtaatatgtgtaaccaaaatgagaaagaatacaagaaatgtttctggagctagttatgtctcacaattttgtagaatcttacagcatctttgataaacttctcagtgaaaatgttggctaggcaagttcagttaaaatatagtagaaatgtttatcctggtatctctaagtatacatttaattgtacagaaaatttacagtgtaacattgtgtcaacatttgcagattgactgtatatgaccttaatctttgtgcagcctgaaggatcagtgtagtaatgccaggaaagtgctttttacctaagacttccttctcagcttctcccataaagagaccctaatatgcattttgatttgtaattggaaatgtaactttcactgaaagtgtcatgtgatgtttgcattacttttaactgctatgtataaaggaaagtgtgtcttttgacttcatcagttatttctcttgtgcacagagaaaaatgcattaaaaatgactaaaaaaaataaaaaattaaaaaatggaaaaaaaaaaaaaaaaaaaa

SEQ ID NO: 28125 - DNA, 2773 bp, Homo Sapiens
ggaggatgctgggaaggaggtaaaatggccaccggcggcggcgcggaggaagagaggaaacgggggcggccgcagcttctgccccccgcgcggcccgcggcccggggcgaggaggccgacggcggccgcgagaagatgggctgggcccaggtggtgaagaatctagccgagaagaagggcgaattccgcgagccgcggccgccgcggcgggaggaggaaagcggcggcggtggagggagcgccgggctcggcggccccgcgggcctggcggcgccggacctcggcgacttcccaccggctggccgcggggacccgaagggccgtcggagagatccggccggcgaggcggtggacccccgcaaaaagaagggcgctgcggaggcgggcaggaggaagaaggccgaggcggcggcggccgccatggcgaccccggccaggcccggcgaggccgaggacgcggccgagcggcccctccaggatgagccggcggcggcggcaggcccgggcaagggtcgcttcctcgtccgcatctgtttccagggagacgagggcgcctgcccgacccgggacttcgtggtaggagcgcttatcctgcgctccatcggcatggacccgagcgacatctacgcggtcatccagatcccgggcagccgcgaattcgacgtgagcttccgctcagcggagaagctggccctgttcctacgcgtctacgaggagaagcgggagcaggaggactgctgggagaactttgtggtgctggggcggagcaagtccagcttgaagacgctcttcatcctcttccggaacgagacggtggacgtggaggacattgtgacttggctcaagcgccactgcgacgtgctggccgtgccggtgaaagtgaccgacaggtttgggatctggaccggggagtacaaatgcgagatcgagctgcgccagggggagggcggggtcaggcacttgccaggggccttcttcctgggggccgagaggggctacagctggtacaaggggcagcccaagacatgctttaaatgtggttcccggacccacatgagcggcagctgcacgcaggacaggtgcttcaggtgcggggaggaggggcacctgagcccttactgccggaagggcatcgtgtgcaacctctgtggcaagcgaggacacgcctttgcccagtgtcccaaagcagtgcacaattccgtggcagctcagctaaccggcgtggccgggcactaaacacccgcctgcctgccagggtgaacacacagccagcttatccctcttaagtgccaaaacttttttttaaaccattttttatcgtttttgaaggagatctttttaaaacctacaagagacatctctctatgccttcttaaaccgagtttactccatttcagcctgttctgaattggtgactctgtcaccaataacgactgcggagaactgtagcgtgcagatgtgttgcccctcccttttaaaattttattttcgtttttctattgggtatttgttttgtttcttgtactttttctctctctccttgcccccctcccgccctccccgccccataccttttcttcccctggattttcaccctttgggctgccttgctcatctttatgccccagcactaggtacggggcccaacacgtggtaggcactccatcagtgtttgctgaattgaaaacattgttgactgtggcttctatcagagtgtctaccttttgcagctcttcccctccctcatttaatttgctgcttttaatctacgtggtctgagaatttgtgaaaccagtgttgttagaagtgtatataatctgaatcaataagctctgaatggtggccaagggcctctcttatggcacaaagatgcatggacttcatgacagctcttttggtggctcagaagccattttttatagaatcatggaatctagaatattcctgctggaaagaacctgagagttggtttggaccaattccctggttttccagcagatgaaacaggcccaaagaggttaaatgactgggtgaaaatcacatagctgtctggtgccagagccagcctatagtagagtcccctgaccccaagcccggtgctcattccactacctctcacacttcacaacaatttcctcaacacttgagggcccagaaagtctgatctctccagaatgatcagcccagaggaatgctgagaaatcacctggaggagggagcagaaagagaaggtttttaaggaggggcttctgaatacttgggagatacggaacggaccaaggaccacactccagggtgcattcgttgctccctggggcaccacttctggattacagtgtgccaggtcctttggaggccctaccccttccccattcattgccaccagtgagaaatgggggtgcccctgtgtaaagaaacctaccaaaggtttacatttgcaccttagcctcaatagctacgaaccctagagaagcagctagctggagctcatgtgcaactcctgattctcaggagaaagatggattttaacccaaaattatgagtgagctgttaactctaaaatgtacttgggagataggccaagcgagaggtcatgggccaactaagtgttatccagtagaaaagacagtacactgcttttcttttagtgtttgcttttcctttgctatatgttttgctatttccttgtggcttagaatgtaaaattgattgttaaaagttttgttctgaataaatatttatcttttgtattgctaaaaaaaaaaaaaaaaaa

SEQ ID NO: 28126 - DNA, 2427 bp, Homo Sapiens
cctcaagtctctttcctcacttctttctcttcacttaaaacaatttttttggaggggttttggggaggaagtgagcggacgctggggatgggtctcgtaagcggccggattgagaggagggaggaagcagggggcttccgagtgggtgacccagacgcgggctgtggggtggggcagttcgtggggtccggtcctggaaaggcgtcgactgccccccaactcttctggtttcctctacgatgagcggaaggtttgaatcctggaggtggggtctccggtgtggagttctggaaactgtgaggtgatttgcagctggtggaatggaacagtgaagaagcattggaatggtagataacgcagatcatctctggaaaggatattgatccgcctcatgtaaagtatgcttagttcctttccagtggttttgctggaaaccatgtctcattatacagatgaacccagatttaccatagagcagatagatctgcttcagcgacttcggcgtactggaatgactaaacatgaaattctccatgccttggaaactttggaccgtcttgatcaagagcatagtgacaagtttggaagaaggtccagctatggaggaagttcatatgggaatagtactaacaatgtcccagcatcttcctctacagctacagcttccacacagacgcagcattcgggaatgtccccgtcacctagcaacagttatgatacttccccacagccttgcactaccaatcaaaatgggagggagaataatgagcgattatctacatccaatggaaagatgtcaccaactcgctaccatgcaaacagcatgggtcagaggtcatacagttttgaagcctcagaagaggacctagatgtagatgataaagtggaagaattaatgaggagggacagcagtgtgataaaagaggaaatcaaagcctttcttgccaatcggaggatttcccaagcagttgttgcacaggtaacaggtatcagtcagagccggatctctcattggctgttgcagcagggatcagacctgagtgaacagaagaaaagagcattttaccgatggtatcaacttgagaagacaaaccctggcgctacactaagtatgagaccagcccccattccaatagaggaccctgaatggagacaaacgcctcccccagtctctgccacatctggtactttccgactgcgacgagggagtcgatttacctggagaaaggagtgcctggctgttatggaaagttacttcaatgagaatcaatacccagatgaagcaaagagggaagaaattgcaaacgcttgcaatgcagttatacagaagccaggcaaaaagctgtcagatctggaaagagttacctccctgaaagtatataattggtttgctaacagaaggaaggagatcaagaggagagccaatattgaagcagcaatcctggagagtcatgggatagatgtgcagagtccaggaggccactcaaacagtgatgatgtcgacgggaatgactactctgagcaggatgacagtacgagccatagtgaccaccaagaccccatctcattagctgtggaaatggcagcagtcaaccacactatcttggcattggcccgacaaggagccaacgaaatcaagacagaggccctggatgatgactgatcagggaggttaaacatgacaagttaacttagtttagacgtagcaccttagcagactttcctcggtccttaacatgtgttcttacagtataacttgcagtttcttgtatgtcaggtagctgttagggtcttgttctgtgaagatggcatggtgccctcagcctttgcatatactctctcagtattaactcccagtaaataataaccaaccaaccaaccaaccaaacttccctctcccagcccccgaggctagaaaatcttgctgctccgtcttagcattccaagaaagtgcttccaggtatttagatagccctcagttctcaaatattagactacgtgtaaaatcttgggtacctttagattcttgtaacactagtctgtactcccttttccttccccaagactgataggatgcaagctgaggtcgtggcacaggaatgacagacaccatttggggagtatccacagagtcaaaggaacactagaatccccacctcagcgtgaggataattgatttccagctgcaataagccgtgcctcattatagccacactgtggctagattatacttctttgggtgctgtgctaagaatgtcaatggaaaaagccgatctcagattttgtttgaagttaacatgcctgacacagacatcctttcctctcacaagctgtgtgacttagtagataaaatactgccttctgcctttgggaccatgattaaaaacaaagacaaaaaccaaaagtcattaaaaaaaaaaaaaaaaa

SEQ ID NO: 28127 - DNA, 2902 bp, Homo Sapiens
gttatgtcccgggtacactctctggagcggcgtctggaagctcttgctgctgaattttcctccaactggcagaaggaggccatgcggctggaacgtctggagctgcggcaaggggctcctggccagggaggtggtggtggcctgagccacgaggacaccctggcgctgctggaggggctagtgagccgccgtgaagctgccctgaaggaggatttccgcagggaaactgctgctcgcatccaggaagaactgtctgccctgagagcagagcatcagcaagactcagaagacctcttcaagaagatcgtccgggcctcccaggagtccgaggctcgcatccagcagctgaagtcagagtggcaaagcatgacccaggagtccttccaggagagctctgtgaaggagctgaggcggctggaggaccagctggccggcctgcagcaggagctggcggctctggcactgaagcagagctcggtggcggaagaagtgggcctgctgccccagcagatccaggccgtgcgggacgacgtggaatctcagttcccggcctggatcagtcagttccttgcccgaggtggagggggccgcgtggggctccttcagagagaggagatgcaagctcagctgcgagagctggagagcaagatcctcacccatgtggcagagatgcagggcaagtcggccagggaagccgcggcctccctgagcctgacgctgcagaaagaaggtgtgattggagtgacagaggagcaggtgcaccacatcgtgaagcaggccctgcagcgctacagtgaggaccgcatcgggctggcagactacgccctggagtcaggaggggccagcgtcatcagcacccgatgttctgagacctacgagaccaagacggccctcctcagcctcttcggcatccccctgtggtaccactcccagtcaccccgagtcatcctccagccagatgtgcacccaggcaactgctgggccttccaggggccacaaggcttcgccgtggtccgcctctctgcccgcatccgccccacagccgttaccttagagcatgtgcccaaggccttgtcacccaacagcactatctccagtgcccccaaggacttcgccatctttgggtttgacgaagacctgcagcaggaggggacactccttggcaagttcacttacgatcaggacggcgagcctattcagacgtttcactttcaggcccctacgatggccacgtaccaggtggtggagctgcggatcctgactaactggggccaccccgagtacacctgcatctaccgcttcagagtgcatggggagcccgcccactagccctgcttactggtgcctgctgccagccatctgggagtgggtgaacagcaccccgccgcttcccccacacgcttgctcggcgctctgacttctaggagcacaagagaggagcctgtggccccatgcagatgaaaaggacgggcagggtctcctgagcagcaggtggctcgaggcggttagcaggctccagcagctcccttcttccttccctctgtgcccgtggcgtctgcttcccatcctgggagtgtttatatatgtagcatatcatgggggactgggaagttgggagaggtaggacctgactggtcttggctggggtcaggggctggtgcctgggagctgatgaagcaggtgccagggctgtgggaggggcaagctacggcctgggctaggtgagctgcctctgcccctgggcaaggaagcgaggccctctgggaggagggtgcttagctccagagcaggatgggacttccccaggcaggaagcacttgatggagagctgcccagctctcctacaaggttagtgccctccacctagggaagcatgaaccacagggtccctgagggccttcgacaaaagtgtgtatttgtcccggggagggtagcagtgggccatggggcttcttgtgccctaaaggggactggctgctgtgatcttctaaggggcccagggccaaccctgtaggcttcccctctgctggggacggtagttgcttttctctctcctgatgctaggttggggcccaccctgctccctgttcctgctagggcctgccagtgcccctgagcttgctttccacattctcccagggtatggagacctagacctgtctttggggccattagcatctggggttatagcaagaagagtggggagcatggaactcctgggctcttgtggggacgttcagggtatcggggtgcgaggtctgtctgcaccggcccccacatctaaccaggccctgatgtaggggtcgtccgctcaggctgcccccttgggctcttgcagctcttgttcaggtagtcgcccttctggtttgttctctgtggggcagttggtgggggctgggggaagaggctggcagaagttaccctggatagggaagggggaggaggggacttttagagccagcaggccccactgtattatgtatatatttttcaaggtctgtttttctaactgaaaagctaagggcttgattcctagccccgttctgtggggcactgggtgatactcagtttcttgttcctggccgtggagaggggcctggggcactggttccggctgtgtctggtggtctggctgcggggaaggggcaagaaggcgggcaggccttcactgcagcactgagcctcaaatccgctctggagcatgaggctggatgcagtggtggtgaggccgccccgctccatcccgaggcagccagggtttgttttgcgctctcctgtcacaaatgctgcactattggttcttaagttttttatctccagatcctaatttatgcctatgcaaaaaataaatgacgcccaagagctgtgggaaaaaaaaaaaaaaaaaaaaaaaaaaaaaaaa

SEQ ID NO: 28128 - DNA, 3030 bp, Homo Sapiens
ggaggtccagcatgagcgcggcgcctccggaggccagactttccactccttgctcacagcctccctgccgccccgccgagacagcacagaggcacccaaaccaaagagcagcccagagcagcccataggccagggccggattcgggtggggacccagctccgggtgctgggccctgaggacgacctggctggcatgttcctccagattttcccgctcagcccggaccctcggtggcagagctccagtccccgccccgtggccctcgccctgcagcaggccctgggccaggagctggcccgcgtcgtccagggcagccccgaggtgccgggcatcacggtgcgtgtcctgcaggccctcgccaccctgctcagctccccacacggcggtgccctggtgatgtccatgcaccgtagccacttcctggcctgcccgctgctgcgccagctctgccagtaccagcgctgtgtgccacaggacaccggcttctcctcgctcttcctgaaggtgctcctgcagatgctgcagtggctggacagccctggcgtggagggcgggcccctgcgggcacagctcaggatgcttgccagccaggcctcagccgggcgcaggctcagtgatgtgcgaggggggctcctgcgcctggccgaggccctggccttccgtcaggacctggaggtggtcagctccaccgtccgtgccgtcatcgccaccctgaggtctggggagcagtgcagcgtggagccggacctgatcagcaaagtcctccaggggctgatcgaggtgaggtccccccacctggaggagctgctgactgcattcttctctgccactgcggatgctgcctccccgtttccagcctgtaagcccgttgtggtggtgagctccctgctgctgcaggaggaggagcccctggctggggggaagccgggtgcggacggtggcagcctggaggccgtgcggctggggccctcgtcaggcctcctagtggactggctggaaatgctggaccccgaggtggtcagcagctgccccgacctgcagctcaggctgctcttctcccggaggaagggcaaaggtcaggcccaggtgccctcgttccgtccctacctcctgaccctcttcacgcatcagtccagctggcccacactgcaccagtgcatccgagtcctgctgggcaagagccgggaacagaggttcgacccctctgcctctctggacttcctctgggcctgcatccatgttcctcgcatctggcaggggcgggaccagcgcaccccgcagaagcggcgggaggagctggtgctgcgggtccagggcccggagctcatcagcctggtggagctgatcctggccgaggcggagacgcggagccaggacggggacacagccgcctgcagcctcatccaggcccggctgcccctgctgctcagctgctgctgtggggacgatgagagtgtcaggaaggtgacggagcacctgtcaggctgcatccagcagtggggagacagcgtgctgggcaggcgctgccgagaccttctcctgcagctctacctacagcggccggagctgcgggtgcccgtgcctgaggtcctactgcacagcgaaggggctgccagcagcagcgtctgcaagctggacggactcatccaccgcttcatcacgctccttgcggacaccagcgactcccgggcgttggagaaccgaggggcggatgccagcatggcctgccggaagctggcggtggcgcacccgctgctgctgctcaggcacctgcccatgatcgcggcgctcctgcacggccgcacccacctcaacttccaggagttccggcagcagaaccacctgagctgcttcctgcacgtgctgggcctgctggagctgctgcagccgcacgtgttccgcagcgagcaccagggggcgctgtgggactgccttctgtccttcatccgcctgctgctgaattacaggaagtcctcccgccatctggctgccttcatcaacaagtttgtgcagttcatccataagtacattacctacaatgccccagcagccatctccttcctgcagaagcacgccgacccgctccacgacctgtccttcgacaacagtgacctggtgatgctgaaatccctccttgcagggctcagcctgcccagcagggacgacaggaccgaccgaggcctggacgaagagggcgaggaggagagctcagccggctccttgcccctggtcagcgtctccctgttcacccctctgaccgcggccgagatggccccctacatgaaacggctttcccggggccaaacggtggaggatctgctggaggttctgagtgacatagacgagatgtcccggcggagacccgagatcctgagcttcttctcgaccaacctgcagcggctgatgagctcggccgaggagtgttgccgcaacctcgccttcagcctggccctgcgctccatgcagaacagccccagcattgcagccgctttcctgcccacgttcatgtactgcctgggcagccaggactttgaggtggtgcagacggccctccggaacctgcctgagtacgctctcctgtgccaagagcacgcggctgtgctgctccaccgggccttcctggtgggcatgtacggccagatggaccccagcgcgcagatctccgaggccctgaggatcctgcatatggaggccgtgatgtgagcctgtggcagccgacccccctccaagccccggcccgtcccgtccccggggatcctcgaggcaaagcccaggaagcgtgggcgttgctggtctgtccgaggaggtgagggcgccgagccctgaggccaggcaggcccaggagcaatactccgagccctggggtggctccgggccggccgctggcatcaggggccgtccagcaagccctcattcaccttctgggccacagccctgccgcggagcggcggatccccccgggcatggcctgggctggttttgaatgaaacgacctgaactgtcaaaaaaaaaaaaaaaaaaaaaaaaaa

SEQ ID NO: 28129 - DNA, 2495 bp, Homo Sapiens
ggagagcctgagttggcattcgtataaatgacctgcctggctcccaccatgagtgctgagcttaacgtgcctatcgacccctctgctcctgcctgccctgagccaggccataagggcatggattaccgggactgggtccgccgcagctacctggaactggtcacctctaaccaccactcggtacaggccctgtcgtggcggaagctctacctgagcagggccaagctgaaggcctccagcaggacctccgccctcctctccggctttgccatggtggccatggtggaggtgcagctggagacgcagtaccagtacccgcggccgctgctgattgccttcagcgcctgcaccacggtgctggtggccgtgcacctgttcgccctcctcatcagcacctgcatcctgcccaatgtggaggccgtgagcaacatccacaacctgaactccatcagcgagtccccgcatgagcgcatgcacccctacatcgagctggcctggggcttctccaccgtgcttggcatcctactcttcctggccgaggtggtgctgctctgctggatcaagttcctccccgtggatgcccggcgccagcctggccccccacctggccctgggagtcacacgggctggcaggccgccctggtgtccaccatcatcatggtgcccgtgggcctcatcttcgtggtcttcaccatccacttctaccgctccctggtgcgccacaaaacggagcgccacaaccgcgagatcgaggagctccacaagctcaaggtccagctggacgggcatgagcgcagcctgcaggtcttgtgaggggccgagggccggggctgggagcggccctgtgcccgggagtccgcagaggcggggatttgtcagatgcagacattttgcaaggctgccgggtagttcaagaccaaagttttcctcttgtcttaataccataaggactggatgacttctcctgagatagaaccgtttggttcaatgagggactgtgttgctaagagcgttgggggcaaagccaggctggttccttggcctcggggtttcctgggtcggggacacggtgaagaggctccagcgggacctgcccatcagtcctgggccaggaggggctccaagcagcacccagcggtccgggggagtctcagacccggcatgcgtggctggcagacctgggagagccagggcagggttttgcgttcagagaaggattgccccagagacccgtggtggacttcatgggtgctgagtggcccgtgtgacagtgatgacacgaaggcttcggcgtttgagtgggtgcaggtgcacgccagggcttggtgcttccctgcctggccctggagggagctgggtggcctggcttcaggggaagacaggagccaggacacacgtcagcccagcaggtgtggggggtgctgcagccctcggcagtggggtcaggccctgggggatgtttccaatggtgggcagcctggccaggccggagaagacatgttcacgggcatctatcagatgcccccttgaggaggctgagttatttgagggctgctgcaaagtacgctaggctcaaattctcttttcccagccagagccctggccacacggactcagaggggccaccggggtggggaaaggacccctccccgaccccccgcagccactggcctccagctctcggccacagaatggcctctaaggctgactcagccgctcccttgggctgtggcagcaggaggcgggggctctggctcaggccccggagcctgtgcagcttgcccatggccctaggcagcgaggggacagcctgggggacttcctgcctaggcaaggtcattggccgggcctggcctgtggatagtggggccaggggccggcccaggccaaatgagtgccctccttgttatgacaccaagtgactacaagggaggcaagacccctccaggcctctcagccgacactgggtcccaccacacacagtgactgtgccgtgcagtgcaggttctggccttttccttgaaggcatctggtagacccgaagccacgctctcgggccgcacatgcacgccgcagcaccagctgccctgagctgcttgtacaaccaaacacctttcccctcttctccagctgtaacctggagagtcagccatgccttgtcttttgttctcataaatagtcactggggccgggcgcagtgactcacgcctgtaatcccagcactttgggaggcctaggtgggcggatcacttgaggtcaggagttcgagaccagcctggccaacatggtgaaaccctgtctctactaaaaaaatacagaaaattagctgggcgtggtggcgggcgcctgtagccccagctacttgggaggctgaggtgggagaatggcaatggcgtgaacccgggaggcagagcttgcagtgagctgagatggcgccactgcactccagcctgggcgacagagccagactcaatctcaaaaaaaaaaaaaaaaaa

SEQ ID NO: 28130 - DNA, 675 bp, Homo Sapiens
actcaccgcctgtccttcctgacacctcaccatgtgtacgggaaaatgtgcccgctgtgtggggctctccctcattaccctctgcctcgtctgcattgtggccaacgccctcctgctggtacctaatggggagacctcctggaccaacaccaaccatctcagcttgcaagtctggctcatgggcggcttcattggcgggggcctaatggtactgtgtccagggattgcagccgttcgggcagggggcaagggctgctgtggtgctgggtgctgtggaaaccgctgcaggatgctgcgctcggtcttctcctcggcgttcggggtgcttggtgccatctactgcctctcggtgtctggagctgggctccgaaatggacccagatgcttaatgaacggcgagtggggctaccacttcgaagacaccgcgggagcttacttgctcaaccgcactctatgggatcggtgcgaggcgccccctcgcgtggtcccctggaatgtgacgctcttctcgctgctggtggccgcctcctgcctggagatagtactgtgtgggatccagctggtgaacgcgaccattggtgtcttctgcggcgattgcaggaaaaaacaggacacccctcactgaggctccactgaccgccgggttacacctgctccttcctggacgctcactcc

SEQ ID NO: 28131 - DNA, 445 bp, Homo Sapiens
ttccactcctgctctccctcctgcaggtgaccccagccatgaggaccatcgccatccttgctgccattctcctggtggccctgcaggcccaggctgagtcactccaggaaagagctgatgaggctacaacccagaagcagtctggggaagacaaccaggaccttgctatctcctttgcaggaaatggactctctgctcttagaacctcaggttctcaggcaagagccacctgctattgccgaactggccgttgtgctacccgtgagtccctctccggggtgtgtgaaatcagtggccgcctctacagactctgctgtcgctgagcttcctagatagaaaccaaagcagtgcaagattcagttcaaggtcctgaaaaaagaaaaacattttactctgtgtaccttgtgtctttctaaatttctctctccaaaataaagttcaagca

SEQ ID NO: 28132 - DNA, 2751 bp, Homo Sapiens
gggggtcccgggaaggagctgggaggacctaggcggccgttccgcggagcccggccgaggaggtccctatgttaactacttgagacaaaaataaatatggccttctacagttataattcagttctggctattgctcgaacaagattccctagccattttgtccatcctacctgctcttcttattccccatcatgtgcatttcttcacttgccagattcccatttaaataagacatgtatgaagaactatgagagcaagaagtactcggatcctagtcagccaggcaatacagtacttcacccaggaactagactaatacaaaagctacacacatccacttgctggctgcaagaagttcctggcaaacctcagctggagcaagccacaaaacatccacaggtgacaagccctcaggccacaaaagaaactggcatggagattaaagaaggcaaacaatcttatagacaaaaaatcatggatgaactaaaatattattacaatggattctacttactttggattgacgccaaagttgctgccagaatggtttggaggctgttgcatggacaggtgctgaccagacgagagagacgaaggtgtttctgaaactcttcccagagatgttgccatcaacttttgaaagtgaatccaaaaaggaagaaaaacagaaaaagaaaatggctgtaaagttggaactagcaaaatttcttcaagaaaccatgacagaaatggcaaggaggaacagagccaagatgggcgatgcctctacacagctctcatcctacgtgaagcaggtccagacaggccacaagcccagcacaaaggagatagttcgcttctccaaactatttgaggaccagctggccctggaacacttagatcgccctcagctggttgccctttgcaaactgctggaattgcagacatttggaaccaacaacctgctccgctttcagctcctgatgaaactgaagtctataaaagcagatgatgaaataattgccaaggaaggggtgacagcattgagtgtatcagaactacaggctgcctgtagggcccgagggatgagatcactgggtctcacggaggaacaactgcgacaacagctcacggagtggcaggacctccacctgaaggagaacgtccctccttcccttttgctcctgtcccgcaccttctacctgatagatgtgaagcccaagccgattgagataccactcagtggggaggctccaaagactgatattcttgtggaattacctactttcactgaatctaaagagaacatggtggatcttgcacctcaactgaagggaactaaggatgaagactttatacagccgccaccagttacatcatcacccataacaccatcaacacctatttcattacctaaaggacccatcacttcttctgaagaacctacactccaggccaaatcacaaatgacggcccagaacagcaaggctagttcaaaaggagcataaaggactacttgaggatggagctcactctcttcagcttccggccctcaacagtggcatctgtaaaggacctcccagataagactgtctggcttcagagagcggatcagctgtttagcccgtggggcagtcctttgaggcctggtaaccattccaggtgatgtgggtagtgagaccaagttcagaccacttagaaaaatataattgcaaagtcccatttcctctgtaccattgtcaccccactcaactttgtataaagcccaccccccatcatgttgtttttttagtttcatgtgtacgacccttcagagaggaaattttttgcacaatggaatcagcttggcaccttagatacctgtctcctatggcttggaattctgagtaagaacttggaagttccaaaaaccattttaggagcacctgattaactttctgaatgatccaccagtaggatcagcaccctggaaacaaagtaccttatgagatgggatggatatactccccagtaagatctttctggatataatgaagcttcctggagaaacagactggcaatcagaaagatttggctgcttccgacacctccatcttgggcctgcagaggctgcagcaatctgtgaggcagccgcaatctgcgaggcagccactcttctagcacatatggctttcattagccaccattttgctaggaagcataattaagggtttaagccttaaccatgtttgtgttgggtgtgtgtgtttctggccagtttgtctttcacaaataagactattagtcatagggattgtgaaagtctgatataatccctgtgctacccagcaacaagtattacattaggatatttatgcttggtgttttcagtattaataatatgaaataatagatagactgccatgcagctgaccaagggctttcttcccctggggagtggttagaaggccaaaggtatttcagcctgtaggtgataaaattagatttctttacttgctgtggttagacagcagtcagttaaaacaagtaaaactccactgtcctgtctgggatcacctaaatgaggaatgtcaccagcacttcacagcaagaatatgcattctacaatgctttctaaatttgtgctccatcagagaagccccaccatgtcccactaatgaagcccagttctttgggaatgatgaatccctactgtgcacatacagcaatcatggatcctgcctatcgaggtgattcacaatacactttcccatttcaaaaaaaaaaaaaaaa

SEQ ID NO: 28133 - DNA, 4121 bp, Homo Sapiens
gggggacgatgcgcgagtacaaagtggtggtgctgggctcgggcggggtaggcaaatccgccctgaccgtgcagttcgtgaccggcaccttcatcgagaaatacgaccccaccatcgaggacttctaccgcaaggagatcgaggtggattcgtcgccgtcggtgctggagatcctggacacggcgggcaccgagcagttcgcgtccatgcgggacctgtacatcaagaacggccagggcttcatcctcgtctacagcctcgtcaaccagcagagcttccaggacatcaagcccatgcgggaccagatcatccgcgtgaagcggtatgagaaagtgccagtcatcttggttgggaacaaagtggacctggaaagtgagagagaagtatcgtccagcgaaggcagagcccttgctgaagagtggggctgcccctttatggaaacttccgctaagagtaaaacaatggtggacgaactctttgcagaaattgtgaggcagatgaactatgctgctcagcctgacaaagatgacccatgctgttctgcatgtaacatacaatagcatccaaatatggctgtcctggatgggatttgcccaatgtcgtaggtgatagaaaactcgcctactccactgcagaacttgcagaatgcgtggtgttaatctacagagaactgcagcccttattcagaattgagcagtgattgtcagttgatatctctgagtaacatttgggttcagtaactacagttttcaccatttgtcctcagtctcctttatgcatctgcaactttaaggcatagtccatcgatctacagggtgatctcatttgaaagctatgatggcattgtcgctgagttgacagaagcaactattgtacaaattaaaaataaccataagggagaaaccagaagaattcctctgaccacttacaattaaaatattttgtcttctttaaaaaaataagtaaaggagaaatattttcctacaagagtactgaatttcaggaaatgggatagagcttctaaccagtgtattccgtcaagtaagataataacagctgacctgccaacagcattacagggagattctttgctcagctaacacatttctgtttttcaaaattgatgcttaattgtagctgttattctaatttgtgacatggaactaactcatgcttcaatccttgatagagcaaaactcagaacaggttatgtaaaaatatagtctggctttagaatttgttaattcacctgctttgccacagaaaatggaggctttcacaagggtttgatcagaattaaaaccccaaacccgccctctgttaggggtggtctttataactttactgaacaagagggaagcaactgtgatgggaagagattacctagccttactaacaagaagcattctaatagataaactagtaccatcatgtaaggaagatgaagccatgttgcatccacatgttcccgtttgcagaaacctcacaggacagtacgaatatctggcatttttaagttcattaaagcagcaaattccttctcgcctttaagggctatggttgtagtgtgacccgtggctaacctgctttcaaaatcaagtatttgctgtagcagagctttattgcaggcattttaaaaattgaataaccatgtgaaataatttgggcttaaaagtgaacataaattatagagtggaaggtaagggacaaaagccttttacctttaattttcctggagaattatatataggttttcttagaacaattttgccctgattactgaagcgtcaaataaagctggagtgaaaattttgttttgaaaaggtgctcaagctctgacatttttggttttcatagtcgtgaagtatttatcatttgcatgactaatggcacaggaaaaacctattcataagttttacaatcaagtatagaggggtcttcagctaacttagttatacataaatgctgaaaagattatcttgagctgggccttgggagaagaatttggccttcagaactgcaatatcactgagcctgcgatctatacaccaccccacattttgttggtttcacagtcttgtgcaagtaacctctggtcttacgtgtgtaactgagagaagagtgtgtgtttgtgtgtgcatgtgtgtttattgttcctaagaatttggcacaagtcagagataattgcctatactaagaatctatactgcagaatatagtgtatcaaaaacttttttcttttaaattattaaagtgtcttttatacttttatgaaatcattggtagccccccaagtgtttaataactggcattaagcttagagggtgaaaaaaaaaaaaaagattgatagtatttttcataatgaaaaaactgaagagatacgtgaatgaaaccaggccatagctgtcataaatctttgacttttgaatatttacattcttcagtataattttttataatcctcaattatgaaccaccttgtttataggacaaaaaaatttaaccaattttattgaaacgaatttaactgtgtaaaagttggtttgattcaaacatgtagagaagttgtagattcaagatatatgctttctctatggaaataaaaatatttgttagtgaattggttgagttttgattcctctaacttctcagaatgattctttagaattctataattcatagcaatttttgacaagtaagattgcaaaatagaaatatctataaagattccacagtttgacattatggcttgctatgcagatgtgaaaataggttaaataatatgaaagatatggcagaatgtaaagtggaaaagatgacctaaaattttgagttgtattaatagttaaaaacatttgtgtcagatgacagggtgggcttttactgtcaagacatgaataagaactgatctggctgcctgatgagtgtttccacgcagccctgcatatttagtgaccaaggcatcaaggacatcccgaaactggaaattcatatccatctggtatgaatatataactcagctggcaaatgaatgtgtttgttgagatattacagtaataaaacacttaagaacaggaagattacatttgttggcataaaaccttagtggctacagaagaaagttgaccttgtgtcactatttattttatgccctgatcagactagcaacttagataagtgaaagtttttctaacatgccttaaaaatattatggtttgatccaaagacccactttttctttagctcttgtgataagattttctttttttttacttttatacaaaggcagcatctttgaatttttttttcttttgatgttgcaacttttgggttcttttaaactgtgatagtgatggtaactgatgcctttcattttgttcaacttacacaaaacaagccagcatctgatcaaaagtattacataaaatattttcttagactattgaaaggtgctttgatgattttctcctttggtttgtagaattaggactgaacttttgactcaaattgctacagttgccatcacctttctgtggtaatactactgatatttgcttttctatataaagaaatgttgcctaaggctgtctggtatttcttttcaagggttttccagtatgaatgttaatgttgtcagtgtatgtatgaatatgaaagtgctttgttttgtttgttgctgttttttgtttatgtgtgtgtttttaatttttttgttcttatcagcagtcttgtgttagcactgggtaagctttaattgtcccttagccaatcaaacattaaggactatggaggtctttttttttttatttaacatgtcattgttcatctattaaatcttgatcagggtttcaagaatgactgcagtgggttttggaaacagacttatcattattgatttgaggtttcccagagatatagttcacagttaattgttgcgctctaatacaactgaccatttaaaattgaacaagtttattgttttgtaacaatgtcagttgttaaaccttgacatttcaattaaaacatgaattgtagttataactcaatgcaaattcaacagttgtatttggagttaaattattttaacaaataaatttatttaatgaaaaaaaaaaaaaaaa

SEQ ID NO: 28134 - DNA, 3987 bp, Homo Sapiens
gggaggtggcggggttcctgcgcgcggcccgccatggaggtggaggaggcgttccaggcggtgggggagatgggcatctaccagatgtacttgtgcttcctgctggccgtgctgctgcagctctacgtggccacggaggccatcctcattgcactggttggggccacgccatcctaccactgggacctggcagagctcctgccaaatcagagccacggtaaccagtcagctggtgaagaccaggcctttggggactggctcctgacagccaacggcagtgagatccataagcacgtgcatttcagcagcagcttcacctccatcgcctcggagtggtttttaattgccaacagatcctacaaagtcagtgcagcaagctcttttttcttcagtggtgtatttgttggagttatctcttttggtcagctttcagatgcttcggaaggaaaaaagtctatctcacaggttttgctcttgacatcttatttgcaattgcaaatggattttccccatcatatgagttctttgcagtaactcgcttcctggtgggcatgatgaatggagggatgtcgctggtggcctttgtcttgcttaatgaatgtgtgggcaccgcctactgggcacttgcaggatcgattggcggcctgttctttgcagttggcattgcccaatatgccctgttaggatacttcatccgctcctggaggaccctagccattctggttaacctgcagggaacggtggtctttctcttatctttattcattcctgaatcacctcgttggttatactcccagggtcgactgagtgaggctgaagaggcgctgtacctcattgccaagaggaaccgcaaactcaagtgcacgttctcactaacacacccagccaacaggagctgcagggagactggaagtttcctggatctctttcgttaccgggtcctgttaggacacactttgatcctgatgttcatctggtttgtgtgcagcttggtgtattatggcctaactctgagtgcgggtgatctaggtggaagtatttatgccaacctggccctgtctggcctcatagagattccatcttaccctctctgtatctacttgattaaccaaaaatggtttggtcggaagcgaacattatcagcatttctgtgcctaggaggactggcttgtcttattgtaatgtttcttccagaaaagaaagacacaggtgtgtttgcagtggtgaacagccattccttgtctttgctggggaagctgaccatcagtgctgcctttaacattgtttatatctacacctctgagctttaccctacagtcatcaggaatgttgggcttggaacttgttccatgttctcccgagttggtgggattattgctcccttcatcccctcactgaaatatgtgcaatggtctttaccattcattgtcttcggagccacgggtctgacctccggcctcctgagtttgttattgccggagacccttaacagtccgctgctagaaacattctccgaccttcaggtgtattcgtatcgcaggctgggagaagaagcattatctttacaggctttggacccccaacagtgtgtggacaaggagagctctttagggagtgagagtgaggaagaggaagaattttatgatgcagatgaagagactcagatgatcaagtgaagagccccagattccccctaagaagcaaaggatcgtcttttatgcctctggctaaggcaggttcttccatgactcctaagagagttgtaaaaatagaggcttggcttgaatgtacatagatggtacctggcatggactgatgtttttaggcacagaagttggagaagagatttcatgaaagacaacatcactgcattgagagaatagttgttaatttgtttagaatttaagttctactcagaatcataacatctggcagaacagcccaaacccacattccaaagtggtaggctcatttgtttctagagatttcatcatgtcgcttttccttcatcatgatctaaataaaggcagatatgtaaaatttctcaccattttggtggggtaagataagctattattaagatttaatccttataccatgttggacatttgcccctatcagttgctcctcaggaatcttctggtacaggttaacatcagcattttcattttgtgtccagggaaaagcacccagaggtcatctgtgtgtcccgagaccctccagctttttcttagctgatgaaatatgagtcctcagcttggttccaagcctgctgattgacttgggctgctggtgccttgagtcccacagatgattcattaggaaaagccagatgtaccaaagcgatttactcagagtcaggggtgtagctctggctgcctgtcagctcccttggatactatattgtatgatttcttcctttcccactaatatgcacatccagaaaaatttccatctgagattctagtacttcaaaatcatgcatagtaaatgagaaagctttaagtagagggcagttaaacagtgacatgttgagcacctggaggaaaaaaaaggtgcagtttttaataagagagaaaatgaaattatctttgataaatttttgtttgttttgctttcagcattgtgccatgagggatttggacaatatttaagaacttcttgtcctagatcagccccaatctgtttaatcaaaatggaaggttcagtaatttcatgggaaaccttggtttttcattaagtgctaccaactttcaagtgaatcttgtatttgatttcctaaaatcatgtcttgaaaacatgttttctcatgaaacttgaatactatctcaaataggaatataaacctggagtcaacaagcttaggcagcattgatttaggtcactttcccagtgaggaaaatttctgtgttttcagaatttccatttctactaacctcttggagaaaaagaaattgaattagaggtaaatagaagacgtcactgtggctgcttctggaagtgctggaagcatcaccccaattggctccaaatactgtcatgttttcttgcacactgacttctggtttccactgtatcagtatgtacctttgtaattgttatttttatgtcttttatgcccttgattattagttgggctcttcataaacagaggccatctctactactgtttatttttccctgctgtgcccagaacattggcgtagacacagtaagaacctagtaaatattactgtttctagccatcagggagattgtggaactcctcccagtataatttttacaaactccaagcaaatctgaccaaaactcccaaattgtcaagtcctgcttaactttctctggaaaatagaccccttctcaacatcagaataggaagagaggaagaacttacaaagacacttaaaagttattcttaaatggtggttgggcatttaaaacagtgaactaacatatatataatttttgattagttggagctttctttgtattatgagagtaatatatctcattacagaaaatttggaaactataaatttagaaacgtatcacccatacgtccaacatcgaaagaaaaccagtgttatgactttgttccatttgaagactaattgggagtccatctctctattggcactgggttcgattgcctctggctaatagagttcaattagttctatccctgggtttcctttcttagctatggggtggaagataggagggggagatctacaatttgaatatgtgttacttaataaggctaggctggccatcagttgcttatttcagatgtgtcactaaattttccttctagatggtccttgagcaaaacttaataattactgttttttatttccactgcctttataaaatcaaaattttctccttttgataaaaactgttgaatactattgatgtagagaatgtgtatatgtgtatatttgcattgattaaattattggaaaacttttcaaaaaaaaaaaaaaa

SEQ ID NO: 28135 - DNA, 3294 bp, Homo Sapiens
tcgagtcttctcatcccgggacgcaaacctcgaaacagctgccggctggtcccggccgaggccggcgcagggagggaggagccgcccgggctgtgggggcgccgcgagctgggccggcctcggtgtgcccgcgccgccagcccgctccagacgcgccacctgggcgctccaagaagaggccgaagtttgccgcggccgtgagttggagctcgcgccgggccgctgcgccgggagctccgggggcttccctcgcttcccggtattgtttgcaaactttgctgctctccgccgcggcccccaactcggcggacgccgggcgcggagagccgagccgggggcgctgtgcacagcgctcgggccaggccgggcgggcatgggcgggggcccgagcaggggtggagagccggggccagcagcagcccgtgcccgggagcggcggcgctgaggggcgcggagctccccgcgaggacacgtccaacgccagcatgcagcgcccgggcccccgcctgtggctggtcctgcaggtgatgggctcgtgcgccgccatcagctccatggacatggagcgcccgggcgacggcaaatgccagcccatcgagatcccgatgtgcaaggacatcggctacaacatgactcgtatgcccaacctgatgggccacgagaaccagcgcgaggcagtcatccagttgcacgagttcgcgccgctcgtggagtacggctgccacggccacctccgcttcttcctgtgctcgctgtacgcgccgatgtgcaccgagcaggtctctacccccatccccgcctgccgggtcatgtgcgagcaggcccggctcaagtgctccccgattatggagcagttcaacttcaagtggcccgactccctggactgccggaaactccccaacaagaacgaccccaactacctgtgcatggaggcgcccaacaacggctcggacgagcccacccggggctcgggcctgttcccgccgctgttccggccgcagcggccccacagcgcgcaggagcacccgctgaaggacgggggccccgggcgcggcggctgcgacaacccgggcaagttccaccacgtggagaagagcgcgtcgtgcgcgccgctctgcacgcccggcgtggacgtgtactggagccgcgaggacaagcgcttcgcagtggtctggctggccatctgggcggtgctgtgcttcttctccagcgccttcaccgtgctcaccttcctcatcgacccggcccgcttccgctaccccgagcgccccatcatcttcctctccatgtgctactgcgtctactccgtgggctacctcatccgcctcttcgccggcgccgagagcatcgcctgcgaccgggacagcggccagctctatgtcatccaggagggactggagagcaccggctgcacgctggtcttcctggtcctctactacttcggcatggccagctcgctgtggtgggtggtcctcacgctcacctggttcctggccgccggcaagaagtggggccacgaggccatcgaagccaacagcagctacttccacctggcagcctgggccatcccggcggtgaagaccatcctgatcctggtcatgcgcagggtggcgggggacgagctcaccggggtctgctacgtgggcagcatggacgtcaacgcgctcaccggcttcgtgctcattcccctggcctgctacctggtcatcggcacgtccttcatcctctcgggcttcgtggccctgttccacatccggagggtgatgaagacgggcggcgagaacacggacaagctggagaagctcatggtgcgtatcgggctcttctctgtgctgtacaccgtgccggccacctgtgtgatcgcctgctacttttacgaacgcctcaacatggattactggaagatcctggcggcgcagcacaagtgcaaaatgaacaaccagactaaaacgctggactgcctgatggccgcctccatccccgccgtggagatcttcatggtgaagatctttatgctgctggtggtggggatcaccagcgggatgtggatttggacctccaagactctgcagtcctggcagcaggtgtgcagccgtaggttaaagaagaagagccggagaaaaccggccagcgtgatcaccagcggtgggatttacaaaaaagcccagcatccccagaaaactcaccacgggaaatatgagatccctgcccagtcgcccacctgcgtgtgaacagggctggagggaagggcacaggggcgccggagctaagatgtggtgcttttcttggttgtgtttttctttcttcttcttctttttttttttataaaagcaaaagagaaatacataaaaaagtgtttaccctgaaattcaggatgctgtgatacactgaaaggaaaaatgtacttaaagggttttgttttgttttggttttccagcgaagggaagctcctccagtgaagtagcctcttgtgtaactaatttgtggtaaagtagttgattcagccctcagaagaaaacttttgtttagagccctccgtaaatatacatctgtgtatttgagttggctttgctacccatttacaaataagaggacagataactgctttgcaaattcaagagcctcccctgggttaacaaatgagccatccccagggcccacccccaggaaggccacagtgctgggcggcatccctgcagaggaaagacaggacccggggcccgcctcacaccccagtggatttggagttgcttaaaatagactccggccttcaccaatagtctctctgcaagacagaaacctccatcaaacctcacatttgtgaactcaaacgatgtgcaatacatttttttctctttccttgaaaataaaaagagaaacaagtattttgctatatataaagacaacaaaagaaatctcctaacaaaagaactaagaggcccagccctcagaaacccttcagtgctacatttgtggctttttaatggaaaccaagccaatgttatagacgtttggactgatttgtggaaaggagaggggaagagggagaaggatcattcaaaagttacccaaagggcttattgactctttctattgttaaacaaatgatttccacaaacagatcaggaagcactaggttggcagagacactttgtctagtgtattctcttcacagtgccaggaaagagtggtttctgcgtgtgtatatttgtaatatatgatatttttcatgctccactattttattaaaaataaaatatgttctttagtttgctgctaaaaaaaaaaaaaaaa

SEQ ID NO: 28136 - DNA, 3816 bp, Homo Sapiens
gggcggctgcaatatggcggaggcggaaggggaaagcctggagtcctggctcaataaagccaccaatccttccaaccgccaggaggactgggaatacataattggcttctgtgatcagatcaacaaggagctggaagggccacagatcgccgtccgactgctggcccacaagatccagtccccacaggaatgggaggcgctccaggccctgacgtacctgggggacagggtgtctgagaaagtgaagaccaaggttattgagctgctgtacagctggaccatggccctgccagaagaagcaaagatcaaagacgcctaccacatgctgaagagacagggcatagtgcagtctgacccaccaattcctgtggataggacgctgatcccctctccaccacctcgtcccaaaaaccctgtttttgatgatgaggagaagtccaagcttttagccaagctgctgaaaagcaaaaacccagatgacctgcaggaggccaacaagctcatcaagtccatggtgaaggaagacgaggcacggatccagaaggtgaccaagcgtctgcacacgttagaggaagttaacaacaacgtgagactgctcagtgagatgctgcttcattacagccaggaggactcttcggacggggacagagagctgatgaaggagctgtttgatcagtgtgagaacaagaggcggactttatttaaactcgccagtgagactgaggacaatgataacagtttgggggacatcctgcaagccagtgacaacctctcccgggtcatcaactcttacaaaacaattattgaagggcaggtcatcaatggcgaggtggctaccttaacactgcctgactcggaaggaaacagtcagtgcagtaaccaaggcacgctcatcgaccttgcggagctggacacgaccaacagtttgtcctccgtgttggccccagcacctactccaccctcctcaggcatcccaatcctccctccaccaccccaggcctcaggacctccacggagccgctcctctagccaggccgaggccaccctggggcccagcagcacaagcaacgccctctcctggctggacgaggagctactctgcttgggcctcgccgacccagcccctaatgttcctcccaaagagtcagctgggaacagccagtggcacctgctccagagggaacagtccgacctggacttcttcagccccaggccggggaccgctgcctgtggcgcctccgatgctcctctgctcaagccctcagccccctcctcaagcagctcccaagctccactgccgcctcccttcccagctcctgtggtcccagccagtgttcctgcacccagtgcgggctcctccttgttttctactggagtggccccagccttggccccaaaagttgagcccgcagtccctgggcaccatggcttggcgttgggcaacagcgcgctgcaccacctggatgccctcgatcagcttctagaagaggccaaagtgacctcgggcttggtgaaacccactacctcccctctcatccccaccaccaccccagccaggcccctcctgcccttctccacggggcccggcagcccgctcttccagccactgagtttccagtcccagggcagccccccgaaggggcctgagctctccctggccagcatccacgtgcccctggaatcgatcaagcctagcagtgcccttcctgtgacagcctacgataaaaacggcttccgcatcctcttccactttgccaaggagtgtcccccaggacgacctgacgtgctggtggtggtggtgtccatgctgaacacggctcccttacctgtcaagagcatcgtgctgcaggctgcagtgcccaagtcaatgaaagtgaagttgcagccaccttctgggacagaactctctccatttagccccatccagccacctgcagccatcacccaggtcatgttgctggccaatccactgaaggagaaggtgcggcttcggtataagctgaccttcgccctgggggagcagctgagcacagaggtgggcgaggtggaccagttccctcctgtggaacagtgggggaacctatgaccccagaggacgctgtgatctccaccttgaagccaggcaggctgccctgagacgaggagggctctggtcccgtcactctccatgccctgacaacagtgcttgtagctttgatgtggaacaggggccctgggcatttctgctgagaaccaaactgctgctgtgataacctctcctttggcccctaaaaggacctgtttttatctacctgtgtgacttgaagtggccatatgctgtcaggggtgcggagtggcccctgacttcactgctgtcccgggaacatggacccccaggcttggcgtaggtgtttgcttccttctactggcattcactgaagccactggggtagggggtggggggtgggagtctctaaagagagactgtcatgggtcattccccacaagagccacatcctcacacctgacagatgcacggcccaaggggctgcagccctgttgcaattccatgcttcccccgccaaccagctcctgctgccatccccagggaggtggcccaggaaggtgcctggcccagaataaggaactggcatactgcaaagtccccagccctgcctctggtggacagcatcgtcctggaatggccacggagtgatgagttgtgtgcttgtccctggcagtggcaggctgtgtcctatggacatcttggcaggacatggaatttggcctcatgacaggcccaactagggataggaaggaaaatgaagagagccagtatttccccttctccagaagcaggtactcagctttctgggaaaagcgtgcctccagccgtggggacaggccatcctactgactacctcttgcttggcatgaaataaactgctatcctccccttggaatctaccgccactctacatcctactgctttggcctccctctcctctcaccagatggcatgtggtgtggcacctgtggctggacacaggaggcctcaggatcacaaatgttacactagacatatgtcctaatgtgctgcccagaaacctcaactgttccccagctactgaggggcactgtcagcgagatgttgggtctggaggtgatgagatcgggccacacttgagctgagtcaccagaccctattgcttcaacagtgcttggcccccgccagcttgtcccagccactctagctgctggatgtgatcctgggacatgtactccaagcctccgtcacaaaaaaaaaaatcaccagctgccatagacacgggggaagcttgcggagcccaggtgaacaagctcagcaatcggacatctctggggaaaggaaggtggcacagaccatgttccctggttcctccctgccccttgccaggcttccttattccttactatgggaagaggtcatatcccttccctgcccctcgctgtctttagcaagcaggtttcactgcttcattagaagaggacaagtcaaaagtgaatcatttttcactacttaaggaataaatccaagagctttccagagactggctgctgcagccctgggaatgtctgtggaattactatgtggaaatggaactttgtgttatgctctagacattacagttatttgagtgttactcgttactgttgaggtcagtgcttcgtggcaaatggctgtactggatatcccagctctgctgcccttgttttgctgcatgttaaataaaaccattttcactgtaaaaaaaaaaaaaaaaaaaaaaaaaaaaaaaagaaaaaaaaaaaaaaaaa

SEQ ID NO: 28137 - DNA, 3617 bp, Homo Sapiens
gagccccagagcgcggcggcagcggcggcctggcccttccagagggccagagccagggacatgcgggcgcccgggactccgcgttccgcgcggcccggcgcctgagcgcctccgttccccgtcccggagctgccggcggcatgatccgacacgccggggcgcccgcgcgcggggaccccacgggtccggttccagttgttggcaaaggagaggaagaggaagaggaagatggcatgcggctttgtctgccagccaacccgaaaaactgccttcctcaccgccggggcatcagcatcctggagaagctcatcaaaacatgcccggtgtggctgcagctgagtctgggccaggcagaggtggccaggatcctgcaccgggtggtggctgggatgttcctggttcgccgggacagcagctcgaagcagctggtgctctgtgtccactttccttctctgaacgaaagctcggccgaggtgctcgaatacaccattaaggaagaaaagtcgatattgtacctggaaggctcggctcttgtgtttgaggacatcttcagattgattgcgttctactgtgtcagtagagacttactgcccttcacactgcggctaccccaggccatccttgaggccagcagcttcacggaccttgagaccatcgccaacctgggtctgggtttctgggactcctcgctgaatcctccacaagaaagagggaagccagcagagcccccaagagaccgggcccccggattccccctagtctccagcctcaggcccacagcccgtgacgcaaactgtgcctgtgaaatcgagctgtcggtaggaaatgaccgcctgtggtttgtgaatcctattttcatcgaggactgcagcagcgccctgcccaccgaccagccacctcttggaaattgccctgcacgccctttgccgcccacctctgatgccacctcacccacctccaggtgggccccacgctgcccaccaccccctcccccagtgctgcccctgcagccctgcagcccagcccagcccccgccactgcctgcgaagaagaaccttcccactgcccctcccagacgccgcgtttccgagagggtgtccttagaagaccaaagtccggggatggcggcaaagggggaccagctcagcctgcctccccaagggacctcagacggccctgaggacacgccccgggagagcacggagcaaggccaggacacagaggtgaaagccagcgatcctcacagcatgccagagctgcccaggacagccaaacaacccccagtcccgccccccaggaaaaaacggatctctcgacaactggcctcgaccctcccagctcccttagagaacgctgagctctgcacacaggcgatggccttggagacacccacgccgggtccacccagagagggccaaagccctgcttctcaggctgggactcagcaccctcctgcccaggccactgcccattcccagagctctccagagttcaagggctccctggcctccctctcagacagcttgggggtgtctgtcatggccaccgaccaggactcctactccaccagcagcacggaggaggagctggagcagttcagcagccccagcgtgaagaagaagccctccatgatcctgggcaaggctcggcaccggctgagctttgccagtttcagcagcatgttccacgctttcctctccaacaaccgcaagctgtacaagaaggtggtggagctggcgcaggacaagggctcgtactttggcagcctggtgcaggactacaaggtgtacagcctggagatgatggcgcgccagacctccagcacggagatgctgcaggagattcgcaccatgatgacccagctcaagagctacctgctgcagagcaccgagctcaaggccctggtggaccccgccctgcactccgaggaggagctcgaagcaattgtagagtctgccttgtacaaatgtgtcctgaagcccctgaaggaagccatcaactcatgcctgcatcagatccacagcaaggatggttcgctgcagcagctcaaggagaaccagttagtgatcctggccaccaccaccactgacctaggtgtgaccaccagcgtgccggaggtgcccatgatggagaagatcctgcagaagttcaccagcatgcacaaggcctactcacctgagaagaagatctccatcctgctcaagacctgcaaactcatctacgactccatggccctcggcaacccagggaagccctatggggcggatgacttcctgcctgtgctcatgtatgtgctggcccgcagcaacctcacggagatgcttctcaatgtggagtacatgatggagctcatggaccccgccctgcagctgggggagggttcctactatctgaccaccacctacggggccctggagcacatcaagagctacgacaagatcacggtgacccggcagctgagtgtggaggtgcaggactccatccaccgctgggagcgccggcgtactctcaacaaggcccgggcctcccgctcctccgtacaggacttcatctgcgtgtcgtacctggagcccgagcagcaggcgcggacgctggcgtcgcgggcggacacccaggcccaggcgctgtgcgcgcagtgcgcggagaagttcgcggtggagcggccgcaggcgcaccggctgttcgtgctggtggacgggcgctgcttccagctggcggacgacgcgctgccgcactgcatcaagggctacctgctgcgcagcgagcccaagcgcgacttccactttgtctaccggcccctggacggtggtggcggctgcggcgggagcccgccctgcctggtggtgcgggagcccaacttcctgtgaggccctcccggggcgcctcccctcacccccaggcgcacgtctggccccgcctctggctgcgcactcccgaccgcgacgtccacgcagcagagggacatgggccattccatgacgtgcccaggccaacgtcgcaggacagttgtgaaaataacatgacgctcgtccaaggccacttcctgagggcaagtcctaatagccctgagacaccgagacggcatgttcttcattagacggaaagggaaactgaggctcaggagagaggcgctccaggccgctgcagccaacaaaccggcgccctcttcacacgtagctcctcaggccattccccatgagtcccccacacccaccccatcctcggtctttgcaaagaagggcccgagcttagtttccccaggactggcctaggaaggagcaccggccacagctgctccccgtgccactcagggtggacccagcatctcaggagcacctcagggtgtcggttaagagacaggcctccacccctgcaccagagcctgctcttagctcccggtgcccccagaccccgcagctctgtgcccggcaagaagcagctagacacacgccagggcgccaagcacggccagctccgcggacccatggacaagcccagccccgcctcagggaaaacagggcctttccctacaggacacgccccagagctgtggcagattgcaggagccatcgtgtggggagaatttaataaaagccctttcgaaaaaaaaaaaaaaa

SEQ ID NO: 28138 - DNA, 3998 bp, Homo Sapiens
agtggagcctgtccggcccccttgctgcccgctagctcccgccggctggcgcaagctgtcggcgccggggcactgcgggcggggtcggagcctggccttcctgacgttgcagctgccgtccccgcacgttccggccagggcctccctcttagggccgggcggtgcccgtggctcaggctgcagagtagaaagcacaaaaaccagcctgattgtatctggaaaaaaccattatgttacagttgataggctcaccccaaaatatgcttttggggactgatttagcacctgcatattctgcgtgaatctctttaattggttgcagttgagctaatggtggagccaaaatgctattgccctgtcttcatcaacatttaatcaagtgttgcggagataggaacatgggagagaaacaatctgggtaacatgaaagtgatgctggttgctaagggaaggcaacttgattctgtgggaagggctgtagctgatccatccgttgtctagatttgagtatgagcacagtggaagaggattctgacacagtaacagtagaaactgtgaactctgtgactttgactcaggacacagaagggaatctcattcttcactgccctcagaatgaagcggatgaaatagactcagaagatagtattgaacctccacataaaaggctttgtttgtcctctgaggatgatcagagtattgatgattctactccttgcatatcagttgttgcacttccactttcagaaaatgatcagagctttgaagtgaccatgactgcaaccacagaagtagcagatgatgaggttactgaggggactgtgacacagatacagattttgcagaatgagcaactagatgaaatatctcccttgggtaacgaggaagtttcagcagttagccaagcatggtttacaactaaagaagataaggattctctgactaataaaggacataaatggaagcaggggatgtggtccaaggaagaaattgatattttgatgaacaatattgaacgctatcttaaggcacgcggaataaaagatgctacagaaatcatctttgagatgtcaaaagacgaaagaaaagatttctacaggactatagcatggggtctgaaccggcctttgtttgcagtttatagaagagtgcttcgcatgtatgatgacagaaaccatgtgggaaaatatacacctgaagaaattgagaagctcaaggagctccggataaagcatggcaatgactgggcaacaataggggcggcgctaggaagaagtgcatcttctgtcaaagatcggtgccgactgatgaaggatacttgcaacacagggaagtggacagaagaagaagaaaagagacttgcagaagtggttcatgagttgacaagcactgagccaggtgacatagtcacacagggtgtgtcttgggcagctgtggctgaacgagtcggtacccgctcagaaaagcaatgtcgttctaaatggctcaactacctgaattggaaacagagtgggggtactgaatggaccaaggaagatgaaatcaatctcatcctcaggatagcagaacttgatgtagctgatgaaaatgacattaactgggatctgttagctgagggatggagtagtgtccgttcaccacaatggctacgaagtaaatggtggaccatcaaaaggcaaattgcaaaccataaggatgtttcgttccctgtcttaataaaaggtcttaaacagttacatgagaaccaaaaaaacaacccaacgcttttggagaataaatcaggatctggagttccaaacagtaataccaattccagtgtgcagcatgttcagataagagttgcccgcttggaagataatacagccatctcttctagccccatggcagcattgcagattccagtccagatcacccatgtttcttcagcagactctcctgctaccgttgactcagaaacaataacactaaacagtggaacactacagacatttgagattcttccctctttccatctacagcccactggcactccaggcacctacctacttcaaacaagctcaagccaaggccttcccctaactctgactgctagtcccacagtaaccctgacagctgctgctcctgcttctcctgaacagattattgttcatgctttatccccagaacatttgttgaacacaagtgataatgttacagtgcagtgtcacacaccaagagtcatcattcagactgttgccacagaggacatcacttcttccatatcccaagcagaactgacagtcgatagtgatattcagtcatctgattttcctgagcctccagacgccctagaagcagacactttcccagatgaagttcatcaccctaagatgactgtggagccatcatttaatgatgctcatgtatccaaattcagtgaccaaaatagcacagaactgatgaatagtgttatggtcagaacagaagaagaaatctctgacaccgaccttaaacaagaggaatcaccctctgatttagccagtgcttatgttactgagggtttagagtctcccactatagaagaacaagttgatcaaacaattgatgatgaaacaatacttatcgttccttcaccacatggctttatccaggcatctgatgttatagatactgaatctgtcttgcctttgacaacactaacagatcccatactccaacatcatcaggaagaatcaaatatcattggatcatccttgggcagtcctgtttcagaagattcaaaggatgtcgaagatttggtaaactgtcattagaataattcttagaaataggcagttcaagcaaagaaggcacactgttaattacaacctcttcaaagaaataggagcaacccccaagaggcttaatttaccaatttaaatagccacagtccttaagccacacacattgttgctgctatgactttttacctcctttaaacacatcatctgaggttgagttttatgacagtatgtagttgagtggaggctgggagttttaagcataaatccctgtttagtgttacatgggaataaggaatttcattcacttcagccactaagaaaagtttagaatcacgaaagcttaactgctgtggtttaaagtacagtttctctaaagatcagacatggcactgtctcctctcaagcctggttgtagttcagatgagtcttttcaacatggtcttcaacatggtctagagcttaccagtgatcttctgatcttcaagaagactaagtttgagacttgaccagcattcaagtatagagacctaggaggtggtcttgtggtggtacatttggttaacccattgctggcagtgggagctgatttaggcagggtaaacaggaaagcattaaaagttaaaattcactacaggttttttgttacttttaaagggaatatggataagcatagtaacaaaacccaccagaatctaagcagttttcaccccctcagaaaccactgtcattagtttacaaagttagcactttgaagtaaaactaaatgaggaaggaagtaatgttacctatccttgataccatgaccatttattagatgttttgctatataaattaccgagagaatagtttgtcatccacttagtgtgttagctggtggggtacaatataacctctcatctcaggctattttaaaaaaacaatatttgcttctataacaaaaggaaacaaatctaagaatcattcctgtactacagaagggttaaggcaaaggtagccttttgggctttttaatgaatatgacccctatagaaaagtcaagaaaaaaaaacccttgtataaattattttatttattattgtaattagatcttcacaaagttgtcttttcactgtgttttgtcaacgtgaaattaaattgtagttataagcaaaagttggttgcctagggaacaattgtatattcagtttaacagaaataaaagaatatttgtcttaagatacaaaaaaaaaaaaaaaa

SEQ ID NO: 28139 - DNA, 3988 bp, Homo Sapiens
gaggcgcggcggccccgtggagcagcgcagtatggcgggcggggcccgggaggtgctcacactgcagttgggacattttgccggtttcgtgggcgcgcactggtggaaccagcaggatgctgcgctgggccgagcgaccgattccaaggagcccccgggagagctgtgccccgacgtcctgtatcgtacgggccggacgctgcacggccaggagacctacacgccgcgactcatcctcatggatctgaagggtagtttgagctccctaaaagaggaaggtggactctacagggacaaacagttggatgctgcaatagcatggcaggggaagctcaccacacacaaagaggaactctatcccaagaacccttatctccaagactttctgagtgcagaggtgagggcctctgtcctgaactttttaacccggtgccacaacctgagggtctccataggggcagggagtgctgagtagtgatggtgtctggagggtcaaatccattcccaatggcaaaggttcctcaccactccccaccgctacaactccaaaaccacttatccctacagaggccagcatcagggtctggtcagacttcctcagagtccatctccatccccggagcatctgtatgattcagaagtacaaccacgatggggaagcaggtcggctggaggcttttggccaaggggaaagtgtcctaaaggaacccaagtaccaggaagagctggaggacaggctgcatttctacgtggaggaatgtgactacttgcaggtagtggcgtggcaatgtgcactccagggtggaagctcttctcatcctgctaactatctttcgtcactcacccccgcccagggcttccagatcctgtgtgacctgcacgatggcttctctggggtaggcgcgaaggcggcagagctgctacaagatgaatattcagggcggggaataataacttggggcctgctacctggtccctaccatcgtggggtgagtggaacttggaggagtaaacattcgaatcccattgggagagtggcttaatgcaaactggtttttttctttacgaggaggcccagagaaacatctatcgtctattaaacacagcttttggtctcgtgcacctgactgctcacagctctcgtctgccccttgtccttgggtgggagcctgggcctgcgacctgagccacctgtcaacttcccttacctgcattatgatgtaagtctcggtgctcttgttctgactgcggcaggctacagggcctcctcatgctcccagtcagtcgctgtctgtactggctctgttcctgaggcccgagcttgaactcagctgtgatgtggcctctcagatcacactgtcctatgcttgtccagcctggggtcaaacatacccctgattcatcccctgggtctctctggtgttaacattctgcctccacacattcttttccaggcccgaggccaagtgcccctcttggtgtcttcttacaggccattctgcccttccactgcagtgccatcctggctacagccctggacacagtcactgttccttatcgcctgtgttcctctccagtttccatggttcatctggctgacatgctgagcttctgtgggaaaaagtggtgacagcaggagcaatcatccctttccccttggctccaggccagtcccttcctgattccctgatgcagtttggaggagccaccccatggaccccactgtctgcatgtggggagccttctggaacacgttgctttgcccagtcagtggtgctgagggtatagacagagcatgccacacaagccagctcaccccagggacacctccaccctctgcccttcatgcatgtaccactggggaagaaatcttggctcagtatttacaacagcagcagcctggagtcatgagttcttcccatctgctgctgactccctgcagggtggctcctccttacccccacctcttctcaagctgcagtccaccgggtatggttctggatggttcccccaagggagcaggtatgtaggaggtgaagaaaactgagatttcaagtatgggagaggttttactatctccattcctggattaaaagtgctgaaaaagtccacagttaaacattcctttattcaccctatggctcccaagaaaagcattcttcctctggagtactggtgtactaaggggacaatacaccaaatttgttgagtttacaatcaagtctactaaggttggacttccttatcagtttggcgagtcccagggcagaataatcatccatctacaggtctctgtttcctctccctccacagcagtggagagcatcccagtgtttggggcactgtgttcctcttcgtccctgcaccagaccctggaagccttggccagagacctcaccaaactcgacttgcggcgctgggccagcttcatggatgctggagtggagcacgatgacgtagcagagctgctgcaggagctacaaagcctggcccagtgctaccagggtggtgacagcctcgtggactaaagttcccagtgtgggagaaaggagctagtttgcaataaaaacagctggatgcaggagcccagtgtcttcatgcagaggagctcaatgtcgcgggactagctacaccaacatatgcactttttacatttagaaacactgtgattagaccacagaacaataaatatgtgccatcagaccaaaaaaaagtagagaaaggagctgaactccactctcgatgctatttacagaggacatctgtaaagtcttcataaaagaccttgaatgatgcctaggatggcagagcccctgggtcctactccatcctccagcctttgtccttgtcctggcctcctgctctccagatctgtaaactgggctcaaggactgtacaagcagagtacaactaccccctccccggtgccagggcgcctgttgggtttggtcctgtgtagatgattcccagagtctcattcatccagctcctcttcagacagaaggtccccatggtcagacagctggtctgcattgctggtactggttgcatcatcctcatcctcagagctggcttcacaggcagtgtggaagagctgcatgagttctcgaaaacggtgggaaacctaagaaaggaggagggctgtattcactggtcttttttttttgtttttgagacggagtctctctctgttgctgagactggagtgcagtggcactgtgtcagcttactgcaacctccgtctcctgggttcaagcaattctcctgcctcagccttcagagtagctgggattacaggtgcccaccaccacacctgactagtttttatatttttagtagagatggggtttcaccatgttggccaggctggtctcaaattcctgacctcaggtgatccacccacctcggcctcccaaagtgttgggattacaggaatgaaccactgcgcccagcctcactgatgctttgtaacaatgttaacatttatgaagcacaatatactgatttgaaaaatctcttgtttattcctcacagcaaggttgggagagctatgtcattatagataaggaaactcaagaggctaaatgttttgcccaaagtcacacaactcctaaaaacaaaactggaatggaaactggggcttccactttaaaatcctggccgggcgcagtatctcacctattcccagcactttgggaggctgaggcaggtggataacctgaggtcaggagttcaagactagccttgccaacatggtgaaaccccgtgtctactaaaaataaataaattagcctggcatggtggtgggtgcctgtaatcccagctactttgggagaggctgaggcaggacaatcacttgaacctgggaggtggaggttgtagtgagctgagattgtgccactgcactccagcctaggcgacaagtgaaactgcgtctaaaatacataaataaataaaaatttaaaaatccacaaaaaaaaaaaaaaaa

SEQ ID NO: 28140 - DNA, 4727 bp, Homo Sapiens
gcggatccccgaactgcgcggcccgactcgagtccgccatattggatgccgcagccgctgctgccagcgcttcctcctctgtcttcgccgagcggggctggttcctgcggcccgagcggcggggagcgccccctcctcgcggccacgcagcagcccgcgtctcgctctccccacccagtgcagtggccgccgcctcttccgccgccgggctcggggcctccgcagcgacaacatggaggccgtgaagaccttcaatagcgagttgtattccctgaatgactataaaccacccatttcgaaagcgaaaatgacccaaattactaaggcagccatcaaagctattaagttctataaacatgtggtacagagtgttgagaagtttattcagaaatgtaaaccagaatacaaagtacctggactttatgttattgactccattgtgcgacaatcccgacatcagtttggtcaagaaaaggatgtgtttgcacccagatttagtaataacatcattagcactttccagaatttatatcgttgccctggggatgacaagagtaaaatagtgagagtactaaacttatggcagaagaataatgtatttaagagtgagattattcagccccttttggatatggcagccgggattccgcctccagttgtcacacctgttttggccagcactaccactgctatgagcaatactccaggaactcctgtgacacctgttactccggccaatgtggtccaaggcttacctgatccgtgggtatctcagataacaaatacagatacacttgcggctgtagctcagatcttgcaaagtcctcaaggccagcagcttcaacaattaatacaaaccttacagatacaacaacagaagccccagccttccattctgcaggccctagatgctggtcttgttgttcagttgcaagctcttacggcacaacttacagctgcagctgcagctgccaacactcttactcccttagaacagggagtctcctttaacaagaagttgatggataggtttgattttggggaagactctgagcatagtgaagaacccaaaaaggaaattccagcttcacaactttctcacgtttcagaatctgtgaacatttccatttttcatcagatagcagaacaactacaacagcaaaacctagaacatctcagacagcagctcttggagcagcaacagcctcaaaaggccactcctcaggatagtcaggaaggaacctttgggtcagagcattcagcgtcaccatcacaagggagtagtcagcagcattttcttgaacctgaagtcaatttggatgattccatagatattcagcaacaggatatggatatagatgaagggcaagatggagtggaagaggaggtctttgaacaagaagctaagaaagtggcggttcgctcaagatcaagaacacattcacgatctcgttcaagatcaccaagaaaacgaaggtctaggtcacggtctggctctagaaagcgtaaacacagaaagcgatcacgctcccgctcaagagaaagaaagaggaaatcatcacggtcgtattcaagtgaaaggagagccagagaaagggagaaagaacgacagaaaaagggattacctccaattagatctaaaacactaagtgtatgtagtactactctctgggttgggcaagtggacaagaaggcaacacagcaagacttaaccaacctgtttgaagagtttggacagattgaatccattaatatgattcctccccggggctgtgcttatgtctgcatggttcatcgacaagatgcatttcgagctcttcagaaactcagttctggatcatataaaattgggtccaaggtcattaagatcgcttgggctttaaacaaaggtgtaaaaacagaatacaaacaattctgggatgtggatcttggagttacatatataccatgggaaaaagttaaagtggatgacttggaaggttttgcagaaggaggcatgattgatcaggagactgtaaatactgagtgggaaactgtgaaaagctcagaacctgttaaagagacggtccagacaactcagagcccaactccagttgaaaaggagacagtggtcacaacccaggcagaggttttccctcctcctgttgctatgttgcagattccagtggcgccagccgtgcctacagttagtttagtcccaccagcatttcctgtgtcgatgccggttcctcctcctggattcagtccaatccctccacctccttttttaagagcaagttttaacccttcacaaccaccacctggtttcatgccgcctccagttcccccacctgttgtgccaccccctacgattccaccagtagtaccaacatctttagtgcagccgtcattatccatgacaccggaaactgtgaaagatgttggatttggtagccttgttataccaggcggttctgttgccagcaatcttgctacttccgctctgccagctggaaatgtttttaatgctccaactaaacaggcagagcctgaagaaaaagtacctcatcttatagaccaccagatttcttctggtgaaaacaccagatcagtgattccaaatgatatttcaagtaatgctgcaattttaggaggacagccgccaaatgtgacaagcaattctggaattctgggagtccaaagaccaaatgtatcaagtaattctgaaattcttggggtccggccatctaatgtttccagtagttctgggattattgcagcccaaccaccaaatattctaaataactctggaatattgggaatacagccacccagtgtgtcaaatagttctggacttttgggagtgctacccccaaatatacctaacaattctggacttgtaggagtacagccaccaaatgttccaaatactcctggacttctgggaacacagccaccagctggacctcaaaacttaccccctttaagtatccctaatcaaaggatgcccacaatgccaatgttagacattcgtccgggactaataccacaggcacctgggccaagattccctttaatacagcctggaattccaccccaacggggaatcccacccccatcggtacttgattcagctcttcatccaccaccccgtggaccttttcctccaggagatatttttagtcaaccagaaagaccttttttagctcctggaagacaaagcgtagacaatgttactaacccagaaaaaaggataccacttgggaatgataacattcaacaggaaggagatagagattatcggtttcctcctatagaaaccagggaaagcattagtagacctccccctgtggatgttagagatgtggttgggcggcctatagatccaagagaaggtcctggacggcctccactagatggtagggatcattttggaagacctcctgtagatataagagagaatcttgtgaggccaggtatagatcatcttggtcgaagagaccactttggctttaatccagagaagccctgggggcatagaggagattttgatgagagagagcatcgggttctaccggtctatggtggtccaaaaggcttacatgaagaaagaggtagatttcggtctggaaactatcgatttgatcctagaagtggtccttggaaccgaggatttggacaagaagttcacagagattttgatgaccgcagaagaccctgggagaggcaaagggatagggatgacagagattttgatttctgcagagaaatgaatggaaatcgtcttggacgagacagaattcaaaacacttgggttccccctcctcatgctcgggtttttgattattttgaaggggccacttctcaacgaaaaggtgataatgtgcctcaggttaatggtgaaaatacagagagacatgctcagccaccacctataccagtacagaatgatcctgaactttatgaaaaactgacatcttcaaatgaaataaacaaggagaagagtgacacagttgctgatatagaaagtgaaccagtggtagaaagcacagaaactgaggggacataatcatcactcagtaggtaaaagataccttttgtaaagttgtcatctctctgtaatagataatggctgactggaccatagttgttcacttttgtctgccagaattaagttaatctgatgttcatgttcacctttctcttaaaataattgtacaactgacttgtatagacattgttcttaatatgaacatggtaggtaaactttttttttatttttttctgataaaatacaaatgttggccccagattcttttaacgtcaaggaaatgaataacagcttgtcagagacttcctatggaagaaagaattttttagatactatcattaggttggatatggtaatagatatatttcagaatagcaagtggtggtatatcttatccatatctttaggctgctgcagaattttaaggttatagataaagctgtgatattttatgcaaagactggctctaggtatttgaggagcacaatacagagattttaaaaagtgattttgtaaaatctacactatggtctctgtttctccaaagtaagtgtttgtgatttgttcctcatactgcagtgagtaaaaaagaaacaagaaaacaacaacataaatattaaagtacgtttcaatgttgggtgaattttgtttttagatgccaataaaacttatttgtttgacaaaaaaaaaaaaaaaa

SEQ ID NO: 28141 - DNA, 4598 bp, Homo Sapiens
actttccggggagcccggcggctctgggaagctcactcctccactcgtacccacactcgaccgcggagcccttgcagccatgagggaacagctcaaaggccacgagactcaaacaacttgctgggaccatcccaaaatgacagagctctaccagtctttagctgacctgaataatgtcagattctcagcttataggactgccatgaaactccgaagactgcagaaggccctttgcttggatctcttgagcctgtcagctgcatgtgatgccttggaccagcacaacctcaagcaaaatgaccagcccatggatatcctgcagattattaattgtttgaccactatttatgaccgcctggagcaagagcacaacaatttggtcaacgtccctctctgcgtggatatgtgtctgaactggctgctgaatgtttatgatacgggacgaacagggaggatccgtgtcttgtcttttaaaactggcatcatttccctgtgtaaagcacatttggaagacaagtacagataccttttcaagcaagtggcaagttcaacaggattttgtgaccagcgcaggctgggcctccttctgcatgattctatccaaattccaagacagttgggtgaagttgcatcctttgggggcagtaacattgagccaagtgtccggagctgcttccaatttgctaataataagccagagatcgaagcggccctcttcctagactggatgagactggaaccccagtccatggtgtggctgcccgtcctgcacagagtggctgctgcagaaactgccaagcatcaggccaaatgtaacatctgcaaagagtgtccaatcattggattcaggtacaggagtctaaagcactttaattatgacatctgccaaagctgctttttttctggtcgagttgcaaaaggccataaaatgcactatcccatggtggaatattgcactccgactacgtcaggagaagatgttcgagactttgccaaggtactaaaaaacaaatttcgaaccaaaaggtattttgcgaagcatccccgaatgggctacctgccagtgcagactgtcttagagggggacaacatggaaacgcctgcctcgtcccctcagctttcacacgatgatactcattcacgcattgaacattatgctagcaggctagcagaaatggaaaacagcaatggatcttatctaaatgatagcatctctcctaatgagagcatagatgatgaacatttgttaatccagcattactgccaaagtttgaaccaggactcccccctgagccagcctcgtagtcctgcccagatcttgatttccttagagagtgaggaaagaggggagctagagagaatcctagcagatcttgaggaagaaaacaggaatctgcaagcagaatatgaccgtctaaagcagcagcacgaacataaaggcctgtccccactgccgtccactcctgaaatggtgcccacctctccccagagtccccgggatgctgagctcattgctgaggccaagctactgcgtcaacacaaaggccgcctggaagccaggatgcaaatcctggaagaccacaataaacagctggagtcacagttacacaggctaaggcagctgctggagcaaccccaggcagaggccaaagtgaatggcacaacggtgtcctctccttctacctctctacagaggtccgacagcagtcagcctatgctgctccgagtggttggcagtcaaacttcggactccatgggtgaggaagatcttctcagtcctccccaggacacaagcacagggttagaggaggtgatggagcaactcaacaactccttccctagttcaagaggaagaaatacccctggaaagccaatgagagaggacacaatgtaggaagtcttttccacatggcagatgatttgggcagagcgatggagtccttagtatcagtcatgacagatgaagaaggagcagaataaatgttttacaactcctgattcccgcatggttttataatattcatacaacaaagaggattagacagtaagagtttacaagaaataaatctatatttttgtgaagggtagtggtattatactgtagatttcagtagtttctaagtctgttattgttttgttaacaatggcaggttttacacgtctatgcaattgtacaaaaaagttataagaaaactacatgtaaaatcttgatagctaaataacttgccatttctttatatggaacgcattttgggttgtttaaaaatttataacagttataaggaaagattgtaaactaaagtgtgctttataaaaaaaagttgtttataaaaaccactaaaaacaaaacaaacacacacacacacacatacacacacacacacaaaactttgaggcagcgcattgttttgcatccttttggcgtgatatccatatgaaattcatggctttttctttttttgcatattaaagataagacttcctctaccaccacaccaaatgactactacacactgctcatttgagaactgtcagctgagtggggcaggcttgagttttcatttcatatatctatatgtctataagtatataaatactatagttatatagataaagagatacgaatttctatagactgactttttccattttttaaatgttcatgtcacatcctaatagaaagaaattacttctagtcagtcatccaggcttacctgcttggtctagaatggatttttcccggagccggaagccaggaggaaactacaccacactaaaacattgtctacagctccagatgtttctcattttaaacaactttccctgacaacgaaagtaaagtaaagtattggatttttttaaagggaacatgtgaatgaatacacaggacttattatatcagagtgagtaatcggttggttggttgattgattgattgattgatacattcagcttcctgctgctagcaatgccacgatttagatttaatgatgcttcagtggaaatcaatcagaaggtattctgaccttgtgaacatcagaaggtattttttaactcccaagcagtagcaggacgatgatagggctggagggctatggattcccagcccatccctgtgaaggagtaggccactctttaagtgaaggattggatgattgttcataatacataaagttctctgtaattacaactaaattattatgccctcttctcacagtcaaaaggaactgggtggtttggtttttgttgcttttttagatttattgtcccatgtgggatgagtttttaaatgccacaagacataatttaaaataaataaactttgggaaaaggtgtaaaacagtagccccatcacatttgtgatactgacaggtatcaacccagaagcccatgaactgtgtttccatcctttgcatttctctgcgagtagttccacacaggtttgtaagtaagtaagaaagaaggcaaattgattcaaatgttacaaaaaaacccttcttggtggattagacaggttaaatatataaacaaacaaacaaaaattgctcaaaaaagaggagaaaagctcaagaggaaaagctaaggactggtaggaaaaagctttactctttcatgccattttatttctttttgatttttaaatcattcattcaatagataccaccgtgtgacctataattttgcaaatctgttacctctgacatcaagtgtaattagcttttggagagtgggctgacatcaagtgtaattagcttttggagagtgggttttgtccatcattaataattaattaattaacatcaaacacggcttctcatgctatttctacctcactttggttttggggtgttcctgataattgtgcacacctgagttcacagcttcaccacttgtccattgcgttattttctttttcctttataattctttctttttccttcataattttcaaaagaaaaccaaaagctctaaggtaacaaattaccaaattacatgaagatttggtttttgtcttgcatttttttcctttatgtgacgctggaccttttctttacccaaggatttttaaaactcagatttaaaacaaggggttactttacatcctactaagaagtttaagtaagtaagtttcattctaaaatcagaggtaaatagagtgcataaataattttgttttaatctttttgtttttcttttagacacattagctctggagtgagtctgtcataatatttgaacaaaaattgagagctttattgctgcattttaagcataattaatttggacattatttcgtgttgtgttctttataaccaccaagtattaaactgtaaatcataatgtaactgaagcataaacatcacatggcatgttttgtcattgttttcaggtactgagttcttacttgagtatcataatatattgtgttttaacaccaacactgtaacatttacgaattattttttaaacttcagttttactgcattttcacaacatatcagacttcaccaaatatatgccttactattgtattatagtactgctttactgtgtatctcaataaagcacgcagttatgttacaaaaaaaaaaaaaaaa

SEQ ID NO: 28142 - DNA, 4778 bp, Homo Sapiens
gaacggaagctgggagcagccgggactggtggcccgcgcccgagctccgcaggcgggaagcaccctggatttgggaagtcccgggagcagcgcggcggcacctccctcacccaaggggccgcggcgacggtcacggggcgcggcgccaccgtgagcgacccaggccaggattctaaatagacggcccaggctcctcctccgcccgggccgcctcacctgcgggcattgccgcgccgcctccgccggtgtagacggcacctgcgccgccttgctcgcgggtctccgcccctcgcccaccctcactgcgccaggcccaggcagctcacctgtactggcgcgggctgcggaagcctgcgtgagccgaggcgttgaggcgcggcgcccacgccactgtcccgagaggacgcaggtggagcgggcgcggcttcgcggaacccggcgccggccgccgcagtggtcccagcctacaccgggttccggggacccggccgccagtgcccggggagtagccgccgccgtcggctgggcaccatgaacagcagcagcgccaacatcacctacgccagtcgcaagcggcggaagccggtgcagaaaacagtaaagccaatcccagctgaaggaatcaagtcaaatccttccaagcggcatagagaccgacttaatacagagttggaccgtttggctagcctgctgcctttcccacaagatgttattaataagttggacaaactttcagttcttaggctcagcgtcagttacctgagagccaagagcttctttgatgttgcattaaaatcctcccctactgaaagaaacggaggccaggataactgtagagcagcaaatttcagagaaggcctgaacttacaagaaggagaattcttattacaggctctgaatggctttgtattagttgtcactacagatgctttggtcttttatgcttcttctactatacaagattatctagggtttcagcagtctgatgtcatacatcagagtgtatatgaacttatccataccgaagaccgagctgaatttcagcgtcagctacactgggcattaaatccttctcagtgtacagagtctggacaaggaattgaagaagccactggtctcccccagacagtagtctgttataacccagaccagattcctccagaaaactctcctttaatggagaggtgcttcatatgtcgtctaaggtgtctgctggataattcatctggttttctggcaatgaatttccaagggaagttaaagtatcttcatggacagaaaaagaaagggaaagatggatcaatacttccacctcagttggctttgtttgcgatagctactccacttcagccaccatccatacttgaaatccggaccaaaaattttatctttagaaccaaacacaaactagacttcacacctattggttgtgatgccaaaggaagaattgttttaggatatactgaagcagagctgtgcacgagaggctcaggttatcagtttattcatgcagctgatatgctttattgtgccgagtcccatatccgaatgattaagactggagaaagtggcatgatagttttccggcttcttacaaaaaacaaccgatggacttgggtccagtctaatgcacgcctgctttataaaaatggaagaccagattatatcattgtaactcagagaccactaacagatgaggaaggaacagagcatttacgaaaacgaaatacgaagttgccttttatgtttaccactggagaagctgtgttgtatgaggcaaccaacccttttcctgccataatggatcccttaccactaaggactaaaaatggcactagtggaaaagactctgctaccacatccactctaagcaaggactctctcaatcctagttccctcctggctgccatgatgcaacaagatgagtctatttatctctatcctgcttcaagtacttcaagtactgcaccttttgaaaacaactttttcaacgaatctatgaatgaatgcagaaattggcaagataatactgcaccgatgggaaatgatactatcctgaaacatgagcaaattgaccagcctcaggatgtgaactcatttgctggaggtcacccagggctctttcaagatagtaaaaacagtgacttgtacagcataatgaaaaacctaggcattgattttgaagacatcagacacatgcagaatgaaaaatttttcagaaatgatttttctggtgaggttgacttcagagacattgacttaacggatgaaatcctgacgtatgtccaagattctttaagtaagtctcccttcataccttcagattatcaacagcaacagtccttggctctgaactcaagctgtatggtacaggaacacctacatctagaacagcaacagcaacatcaccaaaagcaagtagtagtggagccacagcaacagctgtgtcagaagatgaagcacatgcaagttaatggcatgtttgaaaattggaactctaaccaattcgtgcctttcaattgtccacagcaagacccacaacaatataatgtctttacagacttacatgggatcagtcaagagttcccctacaaatctgaaatggattctatgccttatacacagaactttatttcctgtaatcagcctgtattaccacaacattccaaatgtacagagctggactaccctatggggagttttgaaccatccccataccccactacttctagtttagaagattttgtcacttgtttacaacttcctgaaaaccaaaagcatggattaaatccacagtcagccataataactcctcagacatgttatgctggggccgtgtcgatgtatcagtgccagccagaacctcagcacacccacgtgggtcagatgcagtacaatccagtactgccaggccaacaggcatttttaaacaagtttcagaatggagttttaaatgaaacatatccagctgaattaaataacataaataacactcagactaccacacatcttcagccacttcatcatccgtcagaagccagaccttttcctgatttgacatccagtggattcctgtaattccaagcccaattttgaccctggtttttggattaaattagtttgtgaaggattatggaaaaataaaactgtcactgttggacgtcagcaagttcacatggaggcattgatgcatgctattcacaattattccaaaccaaattttaatttttgcttttagaaaagggagtttaaaaatggtatcaaaattacatatactacagtcaagatagaaagggtgctgccacggagtggtgaggtaccgtctacatttcacattattctgggcaccacaaaatatacaaaactttatcagggaaactaagattcttttaaattagaaaatattctctatttgaattatttctgtcacagtaaaaataaaatactttgagttttgagctactggattcttattagttccccaaatacaaagttagagaactaaactagtttttcctatcatgttaacctctgcttttatctcagatgttaaaataaatggtttggtgctttttataaaaagataatctcagtgctttcctccttcactgtttcatctaagtgcctcacatttttttctacctataacactctaggatgtatattttatataaagtattctttttcttttttaaattaatatctttctgcacacaaatattatttgtgtttcctaaatccaaccattttcattaattcaggcatattttaactccactgcttacctactttcttcaggtaaagggcaaataatgatcgaaaaaataattatttattacataatttagttgtttctagactataaatgttgcagagccaagatcgccccactgcactccagcctggcaatagaccgagactccgtctccaaaaaaaaaaaaatacaatttttatttcttttactttttttagtaagttaatgtatataaaaatggcttcggacaaaatatctctgagttctgtgtattttcagtcaaaactttaaacctgtagaatcaatttaagtgttggaaaaaatttgtctgaaacatttcataatttgtttccagcatgaggtatctaaggatttagaccagaggtctagattaatactctatttttacatttaaaccttttattataagtcttacataaaccatttttgttactctcttccacatgttactggataaattgtttagtggaaaataggctttttaatcatgaatatgatgacaatcagttatacagttataaaattaaaagtttgaaaagcaatattgtatatttttatctatataaaataactaaaatgtatctaagaataataaaatcacgttaaaccaaatacacgtttgtctgtattgttaagtgccaaacaaaggatacttagtgcactgctacattgtgggatttatttctagatgatgtgcacatctaaggatatggatgtgtctaattttagtcttttcctgtaccaggtttttcttacaatacctgaagacttaccagtattctagtgtattatgaagctttcaacattactatgcacaaactagtgtttttcgatgttactaaattttaggtaaatgctttcatggcttttttcttcaaaatgttactgcttacatatatcatgcatagatttttgcttaaagtatgatttataatatcctcattatcaaagttgtatacaataatatataataaaataacaaatacgaaaaaaaaaaaaaaaa

SEQ ID NO: 28143 - DNA, 3953 bp, Homo Sapiens
ggctgcggcgacggtggccgcggtggagccacggggcgggcttggcttggtgtgacggcggctgcggcggcggtggcggccgcgaccaggtcggcgtcctcagctggccgagcatggtggcagcctgcacccttggctcccttgtctggtgcagccagcagagccgccagccttgggcgcccatggccctccgtgtgagggcgtgagcggcctgccccagcctcacctgctgatggaggactcaatggcccagtgacctgacaccacaccaccaactccctcccaccagctgacgaatggtggacccagtgacgagtggcccttgtaagggtcatggaataatttgaagcgaggcatgagcggcccctgtggtcgcctgtgactgctggagatagaggtcccagcaccccaagccaacccagcggaccctcccagccctgcttcaaccaatggggccagtggggctccaagcagccacctaaccatccagaccccaccccactcacgcggccatggcgggccctgagggcttccagtaccgcgctctgtacccgttccgccgggagcggccggaggacctggagctgctgcccggcgacgtgctggtagtgagccgggcggccttgcaggcgctgggcgtggccgagggtggcgagcgctgcccacagagcgtgggctggatgcccggcctcaacgagcgcacacggcagcgaggtgacttccctggcacctatgtggagttcctggggcccgtggccctggcccggcccggccctcgcccacggggcccccgcccactgcccgccaggccccgtgatggggcccctgagccaggcctcacactccccgacttgcccgagcagttctccccacctgatgtggctccccctcttctggtgaagcttgtggaggccattgaaaggacagggctggacagcgaatctcactaccgcccggagctgcccgcaccgcgtacagactggtccctgagcgacgtggatcagtgggacacggcagccctggctgacggcattaagagcttcctgctggcactgcccgcgccgctcgtgacccccgaggcctcggccgaggcgcgccgggccctgcgggaggccgcggggcccgtggggccggcgctggagccaccgacgctgccgctgcaccgcgcgctcacgctgcgcttcctgctccagcacctgggccgcgtggcccgccgcgccccggccctgggtcccgcggtccgggccctgggcgccacctttgggccgctgctgctgcgcgcgccgccgccgccgtcctcgccgccgccagggggcgctcccgacgggagtgagcccagccctgacttcccggcgctgctggtggagaagctgcttcaggaacacttggaagagcaggaggttgcgcccccagcgctgccgcctaaaccccccaaggcaaagccggcccccacagtcctggccaatggagggagcccaccctccctgcaggatgctgagtggtactggggggacatttcaagggaggaggtgaacgagaaactccgggacactcccgatggcaccttcctagtccgagatgcttctagcaagatccagggcgagtacacgctgaccctcaggaaaggcgggaacaataagctgatcaaggtcttccaccgagatgggcactatggcttctcagagccactcaccttctgctccgttgtggacctcatcaatcactaccgccacgagtctctggcccagtacaatgccaagctggacacacggctcctctaccctgtgtccaaataccagcaggaccagattgtcaaggaggacagcgtggaggcagtgggcgcccagcttaaggtctatcaccagcagtaccaggacaagagccgcgagtatgaccagctttatgaagagtacacacggacctcccaggagctgcagatgaagcgtactgcaattgaggccttcaatgagactatcaagatctttgaagagcagggccagactcaagagaaatgcagcaaggaatacctggagcgcttccggcgtgagggcaacgagaaagagatgcaaaggatcctgctgaactccgagcggctcaagtcccgcattgccgagatccatgagagccgcacgaagctggagcagcagctgcgggcccaggcctcggacaacagagagatcgacaagcgcatgaacagcctcaagccggacctcatgcagctgcgcaagatccgagaccagtacctcgtgtggctcacccagaaaggcgcccggcagaagaaaatcaacgagtggctggggattaaaaatgagactgaggaccagtacgcactcatggaggacgaggacgatctcccgcaccacgaggaacgcacttggtacgtgggcaagatcaaccgcacgcaggcagaggagatgctgagtggcaagcgggatggcaccttcctcatccgcgagagcagccagcggggctgctacgcctgctccgtggtagtggacggcgacaccaagcactgcgtcatctaccgcacggccaccggcttcggcttcgcggagccctacaacctgtacgggtcgctgaaggagctggtgctgcactaccagcacgcctcgctggtgcagcacaacgacgcgctcaccgtcaccctggcgcacccagtgcgcgccccgggccccggcccgccgcctgccgcccgctgagcaccgaggacccgccccaagcagagccgcccctgggcccgtctgcgccggaggctgcggcggcgggagccacggaccagaccagccacatccaggggtcctcatttctccggctctggctcttgtttggggttctctcaccctctttctctttccttccctcccccattctccagatctccctctgtctccttttctctgtctttcttggcccctgtctctctccatgttgggggtcctaactcccccaccccatatctacgtgtcctccgggcattgccctctccatggctctggtcaccctgaccctctgccctgcccaccgcaggtcccccggggtcccggaagccccttctggctgcacctgccatgtttacagagggcccctgggctgcgcggccccagcctgggcaccctgatttttaagccatagacctggggtcagggcaggaaggaacttcactctgctgcttccgagaacctcggccgtgacattcggggccgggcgggacccgccccacagactccaacttcccctccaaaccccgaagtgaaacccgccaccgggttacccccacaagggggccgctgcgagaagttcacccacccccgaaaaaataattaaactcgcaggccaggcacggtggctcatgcctgtaatcccagcactttgggaggccaagacgggcggatcttttgaggtcgggagttggaggccagcctggccaaaatggcaaaaccccgcatctactaaaatacaaaaattagccgggcgtggtggcggccgcctgtaatcccagctacttgggaggctgaggcgtgagaatctcttgaacccaggagatggaggttgcagtgagcagagatcgtgccactgcactccagcctgggtaacagagggagactcctccgtctcaaaaaaataaataaataaacttgtgagctggccccaacccctcctaggaatcacagctccccgtactggtgccgccgcagtggccaagttgcgacactgcccacggcccctccctctgatgcagattcagggcttctcttcgatcatgttgggttttgattctgtttttccttgactgcaaaaccctctttcctctcctcttttgggacaagagccctggttttctacgctgcccttggccaccacactgcctgccccacgagctgggaggcaggttttgtacggtacgttgttattgatatgatataaaacatcaaacgtcgaaaaaaaaaaaaaaa

SEQ ID NO: 28144 - DNA, 3611 bp, Homo Sapiens
gactcaccctcgcggcccgcccgggaactctgcgggagtcgcggcagctccgctcccagagacccaggagttgggcccagcgtccctcccggaacggcagcatgatcccagtggccgagttcaagcagttcacggaacagcagcctgcgttcaaggtgctcaaaccctggtgggacgtgctggccgagtacctcaccgtggccatgctcatgattggggtctttggctgcaccctccaggtgacacaggacaagatcatctgtctacccaatcatgagctccaggagaacttatcagaggccccgtgccagcaattgctgcctcgggggatccctgagcagattggggccctgcaggaggttaaaggccttaagaacaatttggacctgcagcaatacagctttattaaccagctgtgttatgagacggccctgcactggtataccaagtacttcccttacctcgtggtcattcacacactcatcttcatggtctgcaccagtttctggttcaagttccctggcaccagctccaagattgaacacttcatctccatcctgggcaagtgtttcgactctccatggaccaccagggccctatccgaggtctccggggagaaccagaagggcccagcagccaccgaacgggctgcggccaccatagtggccatggcagggaccgggccggggaaggcaggggagggtgagaaggagaaagtgctggcggaaccggagaaggtggtgaccgagcctccagttgtcaccctgttggacaagaaggagggtgagcaagccaaagccctgtttgagaaggtgaagaagttccgcatgcacgtggaagagggcgacatcctgtacaccatgtacatccgacagacggtgctgaaagtgtgtaagttcctggccatcctggtctacaacctggtctatgtggagaagatcagtttcctggtggcctgtagggtggagacgtcagaggtcacgggctacgccagcttctgctgcaaccacaccaaggcccacctcttctccaagctggccttctgttacatctcctttgtgtgcatctacggacttacctgcatctacacgctctactggctcttccaccggcccctcaaggagtactccttccgttccgtgcgggaggagactggcatgggggacattcctgacgtcaagaatgacttcgccttcatgctgcacctcatcgatcagtacgactccctctactccaagcgcttcgccgtcttcctgtccgaggtcagcgaaagccgtctaaagcagctcaatctcaaccacgagtggacccccgagaagcttcgacagaagctgcagcgcaatgccgcgggccggctggagctggccctctgcatgctgccgggtctgcccgacaccgtctttgagctcagtgaggtggagtcactcaggctggaggccatctgcgatatcaccttccccccggggctgtcacagctggtgcacttgcaggagctcagcttgctccactcgcccgccaggctacccttctccttgcaggtcttcctgcgggaccacctgaaggtgatgcgcgtcaaatgcgaggagctccgcgaggtgccgctttgggtgtttgggctgcggggcttggaggagctgcacctggaggggcttttcccccaggagctagctcgggcagccaccctggagagcctccgggagctgaagcagctcaaggtgttgtccctccggagcaacgccgggaaggtgccagccagtgtgaccgacgttgctggccacctgcagaggctcagcctgcacaacgatggggcccgtctggttgccctgaacagcctcaagaagctggcggcattgcgggagctggagctggtggcctgcgggctggagcgcatcccccatgcagtgttcagcctgggtgcgctgcaggaacttgacctcaaggacaaccacctgcgctccatcgaggaaatcctcagcttccagcactgccggaagctggtcacgctcaggctgtggcacaaccagatcgcctacgtccctgagcacgtgcggaagctcaggagcctggagcagctctacctcagctacaacaagctggagaccctgccctcccagctcggcctgtgctcaggcctccgtctgctggatgtgtcccacaatgggctacactccctgccacccgaggtgggcctcctgcagaacctacagcacctggccctctcctacaatgccctggaggccctgcccgaagagctcttcttctgccgcaagctgcggacgttgcttctgggcgacaaccagctgagccagctctcgccccacgtgggtgccctcagagccctcagccgcctggagctcaaaggcaaccgcttagaggcgctgccagaagaacttggcaactgtggggggctcaagaaggcggggctcctggtggaagacacgctttaccagggtctgccggcagaagtgcgggacaagatggaggaggaatgaagctggggtggggccgttttaggtagagccttaaaaatgcttctgccctggaatctcaaccattgtcttccaagataggaagccaagtgggtccaggccaggagatgggggggggcgggggcagctgtgtcatctttctggggcccaggaggatctgggctggtttgtctggggagacagacaggatgttgtggaggtggggtggaacctggtatggagggattaactcagtcatggcattctccgaccaaaaccacacctgtgtctctggcaggctggctggccttgctcccatccctagaactgctgcctctccctggatattccagctcaattagtgccacatatgggggaaacgacacatcccagtgggatttccaacactccccctccccatgcaacaaagcaacttacttctggagttctctcccaaggagaggacacagacacagttgtttgctgtgttatatgttagctccgaacaatggttctcatttggctaagcatcaaaatcacctagggagtcggtgcaaaacaaaatatcccagtcccctcccctgaaacactgactcaggaggtttggttgggggccaggagtctgttcctaaatattccaggtagttctggtgcaggtaagtggccctgagacagtatgttgggaaatgctgacgtaaaggtatcagggccgggcgctgtggctcatgactataatcccagctgtttgagaggccaatgcaggaggatggttgagctcaggagttcgagatcagcctgggtaacatagcgagaccccacctctgccaaaaaaaaaaaaaatagggtatccaaatatctagattctgatcccttttgaggtcctagaccctttgagaaactgatgaagccaggcacctccttcctcaggaaaatgctggtgtacaaatacacacaaagctcttcaggcagctgatagatttcccccagagagctattcaaggacttcctaaggtgggtggactgcagggttaggacacctgctatagaggtgacatttttccaaggacaagcagggactttggtcttgactgttctctgggtgcttaataaataatactaattatgccaaaaaaaaaaaaaaaa

SEQ ID NO: 28145 - DNA, 4015 bp, Homo Sapiens
gcgctgcctctcagcccaaattggaaacatggccgtacggtcgctgtgggcgggccggctgcgggtgcagcgcctactggcctggagtgccgcgtgggagagcaagggatggccgcttccattcagcactgccacccagagaactgctggtgaggactgccgttctgaggaccctcctgatgagcttgggccccctcttgctgaacgagccttaagggtaaaagctgttaaactggagaaagaagtccaagatttaacagtgagataccagagagctatagctgattgtgaaaacataaggaggcgaacccagagatgtgtggaagacgccaagatatttggaatccagagtttctgtaaggacttggtggaggtggctgacattttggagaagactacagagtgcatttctgaagaatcggagcctgaggaccaaaagctcactctggagaaggtcttccgagggttgttgcttttagaagcaaagctgaaaagtgtgtttgccaagcatggcctggagaaactgacacccattggtgacaaatatgacccccatgagcatgaactcatctgtcatgtgccagctggtgttggggtgcagcctggcaccgtggcattagtaagacaagatggctacaaacttcatggccgcaccattaggcttgcccgagtggaagtggcagtggagtctcagagaagactgtgaagaggccatcaggaactggatgttctcccagagcgcagtcacctatgtttcttttatttattaaactaggtttgtattgtacatgaggtacttcatgtgatatgttttggatttagtcatattggctttatttctaagatattctattgatttaatgtgacctgtttggtctcatcagaagtcttaccattgggcatttgaacagtgtgacaggtgttccaatggcctttatcaaaacatgtttaggaaaattggtactgtgataaatttgaatccaaaatccttttaactatgggttttcaactacatgtttcttcctagcggtctctataacaggaattgtgtagtatcttgtattttgtggaaaaaggagatggtagggattggttcaacatttgggtacttagaggataaagcttcgtggtcgtataaatttagatcatttggattgatttttatacacatagattttcaggactttaccttttgttttgtttttttccttttagccatcttttgttcttgtaatcccaactagataggctttatgctcacatcattgtcccatacccacccctttctcatccccatttgcaggggctaaaggtctagatgagacttggaaggcaaggagcatcgaaatttgagatacccaggaccctttcaagcaagaatggccaaaaagccttgtgctgtctttgctcttcaaattattttcagcctccttgtcatataatcatttcaggcaaactgaggcaacactaacagctaatgacccagatggctctatttgggtaatttacctacaacttattccaccagcctttactcctctgcccttttgtcaattttaccttataatcctttattaaatgatgggaggtggtgatcaggacaaaagtgttaggttcccatgatttctcatttcatttattaatagttaatgctgaatttttttttaagtttcctctggctctatttatgttactttttgcgataagaacacttaacataagtattctctcctcttggcaatttttttttttttcctgtgttgcccaggctgacctccaactcctgggcccaagcaatcctgcctcagcctgccaagtagctaggactacaggcgttcaccactgcgcccgcaaagtttttttgttgtttttttttttaagttggtactcacaaatcactacctctgttatattgacaagctctatttcctattctttgtatctgttaagtcacatctgtgtaaacattgagctcaccttttatatattaacctctagaattaatgggcctatgtggttttttttcagtcttatagctggtgttctgtaaaagatttgtccaataaacgacttaatgaatgatacatcagtcagattttaggaaggcagtcaattatggatattttaatgttggaagaggccttaatgatcaaatctcaccctttctgcttctgaagtatgaaaatctagtctttttaggactggacacaaggaaaataatctctaaactattgactaaattccagtgagagtatgaatgaagaacaactagatattaatgtcaatcatttaagattaatgggcatgcaattaagtctccatttaagattaatgggcatgcaatgaagtctccagcagacaatcagatgttgttggatgtctagattatataggtttaggttgaagttataaaataaaataaaattcattttccactggaactctatgacattcagtggagtggtggaaagttaacctcttatacattatagataattctaagacagcacacaaacttatcaataaagccatctccttgtgggccttaccatcttcatcagatttagacccttaaaaaaacaagtaaatatgcacttttaaaatgcaatcaaaagactggtggttaagcttgtaaaaccagaacatcttttggcattccactaagtatatattgtaaatttaatgaacaatcaaggttcacaataggaagttgtctttttttgccttccattctgtgagatttgacagatggtgacaataagaaaatgagctgattgtaattactctctgtgtgtttttttattgctagctatcattaccagttagaattaacattaattacaattaacaataattttaggtatggaatgttatgattacctaaagagatgtctctacctaatgagctcaagtgatcctcccacctcagcctaccaagtagccaggaccacaggcaagtgcaccaccatgactggctagttttgttttttggtttttggtttttggtttttggtttttttttttggttggttggttgttttttacaggcggggtctcactatattgtccaggctagaagaattttctaatggtctattacacctcccgttttggcaagtaaattcagaataattttaggttcttttgttattcagtagttttgcagacttaaaagtgtaaatttagaattagaagatgaagctatagtagtaagaatctcaagttgaagggctttggggagccaaagcagcatattagagcataggcttgaacttaaatctcagctcagtcacctgcaggactttaggcaccagtgatttcacccttctgagcctgtttctttattcgtaaaatgattataataattctttcacagcgttgtgaggattaagtgaaatgtgttaaatgcctactacagtaggtgctcagatatttatttttatttttttattatgcacattgtttttcctgcctttttatggctgtctaaagtctagggaaaagggaagactggttaatgatgagtagaaaaaacttgtaagctaatcattcactgacttattttccttccattttctggtttttaaaattagccacaccacaggaaacccacatttttagatggaaagagcaagaaaattgtgtcagtgctcttagttattttcatcttaatggtatagtgaaaagacattgacttgagatgatactaaggaagctttggctcactctcacttgaagaggggatcttggtgttgtagtacttggactgtacaaatgttttactgacttttcttactgctgtaaaggaatcaggcagttgggtattgatatgttatttggtgctctcattcatggcaaaggatttgataaataaaagttctttaaacactaaagcaaaatcaaatgagcaaaactaaggatgaaatgtaatattcatcagaacaaggatcactgagaaaaaatattcagaaacaactttaataaaacctgaattgaaataaaaaaaaaaaaaaaa

SEQ ID NO: 28146 - DNA, 2287 bp, Homo Sapiens
ggtggggccgggccggggccggtggggccgggatggccggatgccgaggccacgggtggggcaagcccgtggctccctcctccctcgggagctgttggacctgttgtcccccctccacttccgggctgctggggagggggaccgggcggcctctctcctccctcttcccctgccacctgtctcataggcagaagcggccgtgcccagcgcgcagagcggagcgcgccgaagcctgagctggtgagggggccgaggctgtggggaggtggcagttggacttcggaatctcaaggactccgactcctggcttgttcagagaaggagagccccgactcctggatccctgggagtcccagcggccatggggacgcgaagcagccccgaggaggggaccccgccgccgctggtcccggaatgcgacgtggaggtccagccccagggccatcccgaggagtcccgggaacaggaggcatccgaagtcctggcggaaccttcgagccgcgggggagctgagcagcaggcagaggaagaagaagtgggagaaggcagcagcactgagagcagccgcgacgcgcccgaggctacgcctccgatagctatggcggccacacctcccgcatccacctcttcgcgggaaggggtgcgaggggcggcgcggcgcctgcaaggacagcagctggaggcattgactcgtgtggccctgatggagcagcgagtgaaggagctacagcgccagaggaaggagctgaggatcgagatggaggtggaggtggccttgctgcggggtgagctggctggggagcgagtggccgctcgccgggaggaggagcagctgcgggagctgctggagcagcaggcggcctcggagcagcgcggccgccagcagcgggaacaggaacagaggcggctgagccaggaacgggatcgcctagagggtcttcgccagagactccgcaaggcccagggacagctcgactcacagccagaggaccaacgcgagcggcttctgcagggtgtgcaggagatgagggaacaactggatgtggcccaacgtgcctatgaggacctggagttccggcaactggagcgggagagccggcaggaggaggaggatcgggacagccctgggccccaggtgccagaccccaaggtccaggaactccaggccagcatggcgcagcacagagtgagtcatgcctgaccagcgctgccccccttgctgctcctctctgtctcccctgctctgtgcctgcctttttctctgtccttgtttcctgcctgtcatgttcttctgaatagtaacaacaagagctgatactaatgaaacatttactatgtgccagatatggtcctgaatatttcatgagcatttcctcactgaatccttacaacaaacttatgaggcaagttctattacgtttttttttttttcacgttataaataaagaagctgaaggtcaaggtgcttaagtaatcttttccaagtttccttagtaagggacagagccaggatttttttatttttattttttgagatagcgtctcactctgtcacccaggctggagtgcagtgacacgttcacagctcactgcagcctccacgtcctgtgcttaagcgatcctcccacctcagcctctcgagtagctgggaccacaggtgcgagcccctacacctggataatttttgtatttttagtagagacagggtttcacctggtcttaaactcttggattcaagcgatcctcccaccttggcctttcaagatgctgggattacagacatgagccaccgtgcctcgccacagccaggatttgaacaaacttggtattcaccaccacattctttgcctctattccaaaaagatgcttcatcagatccttcctgggagcctcacattcaagggtctgacttgtgagacccttgggaaaaaatgggcatgtttgaccatatttaacacagagtttcccaaagttttggattagaaagctcggccgggctcggtggctcactcctgtaatcccagcactttgggaggccgaggcaggcagatgacctgagtttgggagtttgagaccagcctgaccaacatggagaaagcccatctctactaaaaatacaaaattagctgagggtggtgacgcatgcctgtaatcccagctactcgggaggctgaggcagagaattgcttgaatccgggaggcggaggtggcggtgagccgagattgagccattgcactccagcctgggcaacaacagcaaaactccatcccaaaaaaaaaaaaaaaa

SEQ ID NO: 28147 - DNA, 4189 bp, Homo Sapiens
actctggttcaagcgcaggggatcggcgggaagctctttcacccccgcttctgccgggctgtaactgcaatggagcaggttgagatgaactcagtcagatggccccacggcccgctcctttcttagcagcccactaatgctccagatccctcaggagaagagccaggcctacccccgccgccgccggcctggctgctacgcataccgtcagaaccccgaggccatcgcagccgcagctatgtacaccttcctgcccgacaacttctcacctgccaagcccaagccttccaaagagctgaagccgctgctgggctccgcggttctggggctgctgcttgtgctggccgcggtggtggcctggtgctactacagcgtctccctacgcaaggcggagcgacttcgcgcggagctgctggacctgaaagctggcggcttctccatccgcaatcagaagggagagcaggtcttccgcctggccttccgctccggcgcgctggaccttgactcctgcagccgcgatggcgccctgctgggctgctcgctcacggccgacgggctgccgctgcacttcttcatccagactgtgcggcccaaggacacggtcatgtgctaccgcgtgcgctgggaggaggcagcgccgggccgggccgtggagcacgccatgttcttgggcgacgcggcggcccactggtatggtggcgccgagatgaggacgcaacactggcccatccgcctggatggccagcaggagccccagccgttcgtcaccagcgatgtctactcctccgacgccgcgtttgggggcatcctcgagcgctactggctatcttcgcgcgcggccgccatcaaagtcaatgactcagtgcccttccacctgggctggaacagcacggagcgctcgctgcggcttcaggcgcgctaccacgacacgccctacaagccacccgccggccgcgccgcagcgccagagctgagctaccgagtgtgcgtgggctcagacgtcacctccatccacaagtacatggtgcgtcgctacttcaacaagccgtcaagggtgccagcacccgaggccttccgagaccccatttggtccacatgggcgctgtacgggcgcgccgtggaccaggacaaggtgctgcgttttgcccaacagatccgcctgcaccacttcaacagcagccacctggaaatcgacgacatgtacacacctgcttatggcgacttcgacttcgatgaggtcaaattccccaacgccagcgacatgttccgccgcctgcgcgacgccggcttccgcgtcacgctctgggtgcacccttttgtcaactacaactcgtcgcgcttcggcgagggcgtggagcgcgagctgttcgtgcgcgaacccacgggccggttacctgcgctggtgcgctggtggaacggcatcggcgcggtgctagacttcacgcacccaaaggcccgcgactggttccagggacacctgcggcggctgcgctctcgctactccgtggcttccttcaagttcgacgcgggcgaggtcagctacctgccgcgggacttcagcacctaccggccgctgccggaccccagcgtctggagccggcgctacactgagatggcgctgcccttcttctcgctggcggaggtgcgcgtaggctaccagtcacagaacatctcctgcttcttccgcctggtggatcgcgactctgtgtggggctacgacctggggttgcgctcactcatccccgcggtgctcaccgtcagcatgctgggctacccattcatcctacccgatatggtgggcggcaacgccgtgccccagcggacagccggcggcgatgtgcccgagcgcgagctctacattcgctggctggaagtggccgcctttatgccggccatgcagttctctatcccgccctggcgctacgacgcggaagtggtggccatcgcgcagaagttcgccgccctgcgggcctcgcttgtggcaccgctgttgcttgagctggcgggcgaggtcaccgacacgggtgaccctatcgtgcgccccctttggtggattgcgcccggcgacgagacagctcaccgtatcgactcgcagttccttattggggacacgctgcttgtggccccggtgctggagccaggcaagcaggagcgcgacgtctatttgcccgccggcaagtggcgcagctacaagggtgagcttttcgacaagacgccggtgctgctcaccgattacccggtcgacctggatgagatcgcctactttacctgggcgtcctgacccagcccagggcccggtaaccgcaaagcccccagtcttcatgcagaccttgaaccctccgtcacacccgcaccatgtactcccaggaacctccacctctataccacccattaagtggctgctgacttaaatgtgctggaaccagctgctgaaggtggggcctagggagggggcactgaagcaatctcctgctccaacgcacaatccttactgtgccctttccacccccacactcacaccaatctgcagaaacctcttccctggggtggaagccagagagcttagaggaaaaaggtcagctctcttcctgttatacatggttatacatggttggggtttaaaagcacaaagagaaacctccccctcctggctttcgtggccatctttgtccatcttaggtggggacttgatcttatttaaggtctccaaatagcccccaccacacttagaacgtgtgttttcttagtgttagaagccaggccctgagtccccagcactcacctgaactgtggctgatttggtcccagtccagctggggaggtgtttggctgacaaggaggcaagagatcccctcccagggaacaggaggactgggcttagcacagagccatcatcatgttcccaatttgtgaagagactcctaacactgcactaacccatttgtgtacatacatgggctcagccctgggccaaatgtgcctgatgggaacagacttgcagggccatgcaggccagacttcgtgccttaactgaagagtgtgcgtgtgtgtgtgtgtgagagagagagagagagaaacacgcatcatgggtccctgatctatgaaatgaacacaacctctctgaggctggatgatctggaggaagggggcatggagcaaatttgaggctctgattgctgagccagcctcctcccaggcggtttccccaggactctcgtaggaaataaatagccctttcaagattcctcagctgcctcaccccctgcacatgtgcctggggtgtggcctagaagggagtgatgttcttactctggtggtctgtgcttctgaacacaggctacatgcacacactgacaactaccaataaacagacaggggaaggtctttcatctcagccattttctcttccccccgcccccccttagatggagtcttgctctgtcacccaggttggagtgcagtggcacaatcagctcactgcaacccctcctcctaggttcaagcgattgagtagctgagattacaggcatgcatcactatgcctggctttttgtattttttagtagagatggggtttaccatgttggccaggctagtctcaaactcctgacctagtgatgcacccaccttggcctcccaaagtgttgggattacaggcatgagccaccacgccagccattttctctttctaagaagagcaacctcagccggagtgagttttttctgactttgcagctgagtctggagaaaagtggcatgccagagcgggtcggtgggaaacagggtgaactttagcttccatcaacagctctggtagcaaaaccagtcccctaccccctagagaatgcatccgtttccccacctgatatggtttggctgtgtccccacctaaaactcatcttgaattgtagctcccataattgccatgtgttgtgggaaggacccagtgggagataattgaaatatgggggcagtttccgccatactgttctggtgatagtgaatagatctcatgagagctgatgattttataagaggtttccccttttgcttagttctcattctctcttgcctgccgccatgtaagacgtgcctttctgtcatgcttgtgaggcctccccagccacgtggagctgtgagttcattaaacctctttttctttataaattaaaagaaaaaaaaaaaaaaa

SEQ ID NO: 28148 - DNA, 1649 bp, Homo Sapiens
gccatgtcgtttgctgagagcgggtggcggtcggctctgcggcgccgcggtcccggcaccccgggccctgtggctcggccatcgtattcctcctttactcagggggacagctggggtgaaggcgaagtcgacgaggaggagggatgcgaccaagtggctcgcgacctgcgggcggagttctcggctggggcgtggtcagagcccagaaagcgctcggtgctcccgccggacgggaacgggtcgcccgttctgcccgataagcgcaatggtatctttcccgcggccgcgggcagcagagcccagcctcggcggtggccggtccaggtcctctctattctctgctcgctgctcttcgccattcttctcgccttcctcctcgccatcgcctacttgatcgttaaagagttgcatgctgagaatttgaaaaatgaagatgatgtagacactggactattaggattctggactctacttataatatccctaactgctggattctcctgttgcagcttttcttggacagtgacttactttgattcttttgaaccaggaatgtttcctcctactcctctttcacctgccaggttcaagaaactgactggacattctttccacatgggctatagcatggcgattttgaatggcatcgtagctgctcttactgtagcatggtgcctcatgtaaacccacactggagcgatattgttggcaaaacttaatcatgattgttttgtaataacaagaaggagcatcactgtctactcagaagactgagaaacctgctgttcattatgtagttcagatatttatcacaatcatcctcattatggaagaccttttaaagcattgttttagaatgtctgagtattaagatacagattaattgggaatatctgagtattaagtactttcttcagagtataagatgtttacctcatctttttacttttgtgtgtgtagttctttcaagttgtaggaaacattttaatggaatttaaactcaaaaacttgaatacaggacaatgcttgccttttcatgtatgtactacattttttgctaagaaatactgatatttctgtttagttgagctagaaatacttcttatttatacatttaggaaagcaaataatgcctactactccgacttttatagaagctacttttaaatcagaatatttaatttttgatattcatataattaatagaagttgcatttatattttttatggggcatagttccttatgtgtttttttaatgtattttcatactacatactgaatttgtatgtttttaaaattgttacatctagacaactgtaaacattatttttttagctagtgcaaacctagtacctgccatttttactaatttttgtctttaaaaaaagcaaaaaagcacattgacctaagttgaaaattaagtaagtttatttttaacaaaaaatgcctgaaaaaagctaaattatttaagtcattaagatattgagaaaaaatttgaaatttttactatttctgtttccacaattccaaatatttatcttggtgtatatattgttactttaacagaacttgcattattttgtttttaataaatataaacatgaaatttttgtatgtgaaaaaaaaaaaaaaaaaaaaaaaaaaaaaa

SEQ ID NO: 28149 - DNA, 1933 bp, Homo Sapiens
ggagatgggggcggcggcggcggaagcggatcgcactctctttgtgggcaaccttgaaacgaaagtgaccgaggagctccttttcgagcttttccaccaggctgggccagtaataaaggtgaaaattccaaaagataaggatggtaaaccaaagcagtttgcgtttgtgaatttcaaacatgaagtgtctgttccttatgcaatgaatctacttaatggaatcagactttatggaaggcctatcaaaattcaatttagatcaggaagtagtcatgccccacaagatgtcagtttgtcatatccccaacatcatgttggaaattcaagccctacctccacatctcctagcaggtacgaaaggactatggataacatgacttcatcagcacagataattcagagatctttctcttctccagaaaattttcagagacaagcagtgatgaacagtgctttgagacaaatgtcatatggtggaaaatttggttcttcacctctggatcaatcaggattttcaccatcagttcaatcacacagtcatagtttcaatcagtcttcaagctcccagtggcgccaaggtacaccatcatcacagcgtaaagtcagaatgaattcttatccctacctagcagatagacattatagccgggaacagcgttacactgatcatgggtctgaccatcattacagaggaaagagagatgatttcttctatgaagacaggaatcatgatgactggagccatgactatgataacagaagagacagtagtagagatggaaaatggcgctcatctcgacactaacacatgttaaaaggacattgtttttatagggtcattttaggccctttgactaagttgatatggaaatattttgttgaaaaactgtacagagcagctttacaagttgtcacatttctttataaatttttttaaagctacagtttaatacaaaatgaattgcggttttattacattaataacctttcacctcagggttttatgaagaggaaagggttttatgcaaaagaaagtgctacaattcctaatcattttagacactttaggagggggtgaagttgtatgataaagcagatattttaattatttgttatctttttgtattgcaagaaatttcttgctagtgaatcaagaaaacatccagattgacagtctaaaatggctactggtattttagttaattcaaaaatgaaacttttcagtgattcactttactaacattctatttgagaaggcttattggtaaagtttggggataaaggcattgcttaacttcttatataatttaggtataaattctgtgacatgctcttgagctttaccctagttgaacatacatgtgtagatttacacatactgtttcattctaaaatttagaaattgttcattaaatcccatttgaggtataagtcactcaggaagttaaaatatctctacacgtatatttttacattaaaaatacagtgttagcataaatccccttttcaggaagaacaaaaatgtcagtgcatagttagataaaatggtaaaatgttttactgaaagcatacttttttggaaaatagattcatgaagcctttaagtgctgcttctgtcagtcaaacgttaaaaactttaacattttcaaagtgcccagactgtgtacaaagacacatgtaatggagattgtacaggttgtttttttgtttgaacctttgaaagagtttaatcttaacgttttctaattttaaaattttaaaatcttgtttaacaaaagcttgtattaagatactgttttcatttcattacagaattgtttataaaagttcatttgttgaaaaataaggatcctttttaataccacagcatttgtactgttcctttttaatatactgaaaatacaaaaaaaaaaaaaaaaaaaaaaaaaaaaaa

SEQ ID NO: 28150 - DNA, 3536 bp, Homo Sapiens
agggaggcttgaggttcgggtagtcggtgacatggcggaggccgcggcgctggtgtggattcgcggccctggcttcgggtgcaaggcggtgcggtgtgcctcgggtcggtgcaccgtccgggattttatccaccggcactgccaagatcagaatgttccagtggaaaacttctttgtgaaatgcaatggagcactcattaacaccagtgacacagtgcagcatggagctgtttatagtttggaacccagactttgcggtggaaaaggaggttttggatctatgctccgagcacttggtgctcagattgagaagacaaccaatcgagaagcttgtcgggatctcagtggaaggagactacgcgatgtcaatcatgaaaaagcaatggctgaatgggtaaaacaacaagccgagcgagaggctgaaaaggagcagaagcggctggagcgactgcagcggaagcttgtagaacccaagcactgcttcaccagccccgactaccagcagcagtgccatgagatggctgagcgtctggaggattccgtcctcaaaggtatgcaggctgcctccagcaagatggtttcagcagaaatcagtgagaatcggaaacggcaatggcctactaaatctcaaacagacagaggagccagtgcgggaaagaggagatgcttctggttgggcatggagggactagagactgcagaagggtccaactctgagagttcagatgatgacagtgaagaagcaccaagcacttcaggaatgggtttccatgctccaaaaattggtagcaatggtgtcgagatggcagccaaatttcccagtggttctcagagggcgagagtagtgaatacagaccatggatcaccagaacaactgcagatcccggtgactgactctgggaggcatattttagaagactcatgtgctgagctgggggagtccaaagagcacatggaaagcaggatggttacagaaacagaagagacccaggagaagaaggcagagagtaaagaacccatagaagaggagcccactggggctggactgaataaggataaagagacagaagaaaggactgatggggaaagagttgctgaggtagcacctgaagaaagggaaaacgttgccgttgccaaactgcaggaaagccagccaggaaacgcagttattgataaggaaactatagatttattggcgttcacctctgttgcagaactggagttgctgggtttggagaagctcaaatgtgaactgatggcccttggactgaaatgtgggggcactctgcaggagcgggcagcaagactcttctctgtcagaggactggcaaaggagcaaattgacccggctttatttgccaagcctttgaaagggaagaaaaaatgagtatcatcagagctgattcctatttgtttatagtgtctaccatttacaacctgcataatgtggactcttgaccagtattcctgttgatattaaaagctaactttttagtaacccaattctaactatcccctttttccttgtcagggctgtagaattaatgtctgaaaccatctgggccttaaattttctttgtctggttttctatagtgtatttaataaatatagggctattcacattttttggtttgatcttggtgtcatttaggtaatgaatctatccaagaaatctatccttttggcccaggttatcaaatttgtagacataaggttatttataatggtcccttcttacccttttaatgtctttaggagctgtgttgataatttccttttcattatgatactggtaatttctgttctcactttcctaatcaggttgggtaggggtttatcagttttactgatctgactttttattttattttattttttttgagacagtcttacactgtctcccaggctggagtgcagtggcgcgatctcggcttactgcaagctctgccttccgggttcatgccattctcctgcctcagcctccccagtagctgggactacaggctcccaccaccacgcccggctaattttttatatttttagtggagactgggtttcactgtgttagccaggatggtctcgatctctttacctcgtggtccacccgcctcagcctcccagagtgctgggattacaggcgtgagccaccgtgcctggccgacgatataacttttaaagaaccaacctttggttttatttttctcaattgtttatataattaatttctgttattttctttcttctatttagcttgagtctcctttgatcttttttctttagttccttaagataagccttaggtcattgatcttagacgttatttaaaatacatatttaaagctatacattttcttttaagcattactttagttgcgactttacaattttattatgtcgtatttttattattcagttctaattttcttttttttttctttttgagatggaatttcgcttttgttgcccaggctagagtgcaatggtacgatctcagctcactgcaacctctgcctcctgggttcaagcgattctcctgcctcagcctcctcagtagctgggattacaggctccagccaccatgcctggctaatttttgtatttttagtagagatggggtttcaccacattggcctgggcaatgtatagtgagaccatgtctctaagaaaaacaatatgtaatttgaattgttgggttaatatgttttgtaatatcgatgagattaagtggttgatagtattgttcagatcttctatgtctttactgatccttttgtttatttctatcaggtgctgagaaaggatgttaaaatcttcaattatgattgtggaattgtctatttcttaaattctaccagtttttgtatgaagctctaataacttatgtcttcctaatgtattgaccattttatcattatgaaatttccctctgtctctggtaatttgggtttgaaatctactttatcttatgtgaatatagccactgcagccttcttaagcttagtgtttgcacagtatacctctttctattaatttactttgtgcttctgtgcctatttaaagtagtttctttaaacaacatatacttgagacttgcatttttatctgttctctctgtatcttttaataagtttaacattaaatgtaattattaataggtttctaatttacatgtttcctgtttagataagattattttataattgtattttaatttattggctctttagctatactgttttaataatttttttaagttggatgttctagtgattacaatatacattcttaatttttcagtctacctagagttgatgtgccacttcacataaaatgtagaaatcttgtaagtatgtacatccatttatcatacctgtcttttatgctgtagttgtcatacatattaaatctacatatttaaatattgtaagtcctgtcataagttacaatttctgctttaaataatgatatgtattttaaagaaattaagaggaaaaaataaaatcttttgtatttattcacaaaaaaaaaaaaaaaa

SEQ ID NO: 28151 - DNA, 5140 bp, Homo Sapiens
gctgctacccggcaccccctccccgcggccggcagcccgctaggtattatgattagcgctgggtgcggggtttcggcggccgggagggagttgtcggcgccgcggccgctgcggacggacgctcgcctgccggctgagatatccatgacgacattgaaaatgaattttttgtattcaccagatattcttatatgagaagatctattttaaacagtctaaatattttttcttctgttggaccagcatggcaggatttaagcgagggtatgatggaaagattgctgggttatatgatctggataaaaccttgggtcgaggccattttgccgtggttaaacttgccaggcatgtctttacgggtgaaaaggtggcagtaaaagttattgacaagacaaaactggacactctagctactggtcatcttttccaggaagtgagatgcatgaaactagtgcagcatcctaacatcgtccgcctttatgaagttattgacacccagaccaaactatatcttattctagaacttggggatggaggagatatgtttgattatataatgaaacatgaggagggtcttaatgaagacttggccaagaagtattttgctcagatagttcatgctatatcttattgccataaactccatgtggttcacagagacttaaaaccagagaatgtagtcttctttgaaaaacaaggtcttgtaaagttgacagactttgggttcagcaacaaatttcaaccagggaagaagctcactacaagctgtggatctcttgcatattccgctccagaaattctgcttggtgatgagtatgatgcacctgcagtagatatttggagtctgggagtgatccttttcatgttggtgtgtgggcagccgccctttcaagaagccaatgacagtgaaacactgacaatgatcatggattgcaaatatacagtaccatcccatgtgtctaaagagtgtaaagacctaatcacacggatgctacagagagatcccaagagaagggcttatttagaagagattgaaaatcatccttggcttcagggagtggacccttcaccagctacaaagtataacattccccttgtgtcatacaaaaatctctcggaagaggagcacaacagcatcattcagcgcatggtgcttggggacatagcggatcgagacgccattgtagaagccctggaaaccaacaggtataaccatatcacagccacatacttcctgctggctgaaaggatcctgagagaaaagcaagagaaagaaatacagaccagatctgcaagcccgagcaatatcaaggcccagtttaggcagtcatggccaaccaaaattgatgtaccccaggaccttgaggatgacctcacggccactcctttgtcccacgcgactgtccctcagtctcctgctcgggctgctgacagtgtcctcaatggccacaggagcaaaggcctgtgtgactcagctaagaaagatgacctccctgagttggctggaccagcactctctacggtgccacccgcaagcttaaaacccacagccagtgggcggaagtgtctgttcagggtggaagaagatgaagaggaagatgaggaggacaagaaacccatgtccctctcaacacaagtggttttgcgccggaagccatctgtaaccaaccgcctgacatccaggaagagtgcgcccgtcgtcaaccagatctttgaggaaggggaatctgacgatgagtttgacatggatgagaatctgcctcccaagttgagcaggttaaagatgaatatagcttctccaggtacagttcacaaacgctaccaccggaggaaaagtcagggccggggctccagctgcagtagttcggagaccagtgatgatgattctgaaagccggcggcggctcgataaagatagcgggttcacctactcctggcaccgacgggatagcagcgaggggccccctggcagtgagggggatggcgggggccagagcaagccaagcaatgccagtggaggggtggacaaggccagccccagtgagaacaatgctggtgggggcagtccctccagcggctcgggtggcaaccccaccaatacatcgggtaccacacgccgctgtgccggcccaagcaactccatgcagctggcctctcgcagtgctggggagctcgttgagagcctcaaactcatgagcctctgcctcggctcccagcttcatgggagcaccaagtacattattgatccacagaatggcttgtcattttccagtgtgaaagtccaagagaaatctacgtggaaaatgtgcattagctccacagggaatgcagggcaggtccctgcagtgggcggcataaagtttttctctgaccacatggcagataccaccactgaattggaacggataaggagcaagaacctaaaaaataacgtgctgcagctacctctgtgcgaaaagaccatctctgtgaacatccagcggaaccctaaggaggggctgctgtgcgcatccagcccagccagctgttgccatgtcatctgactgtggccccatctggccgctagcacgcttcctgctcagagcagtgaagaccggctcacttcactgttcaatttggttttactattttaaagtgggcgttaggagcaattatttattacctttccatttgttagcctgatgatgtgacaatgcatggtctttgtgcatgctgctagacacttttctttcccagccgaaaagcctattatgtaatttttacattcataattttaatgtggatgatcaggattaaatcaagatatatatctggaacctcttataaatggagcacttagaaatttgttgttctgcacttaacctagagagagaaaaaatgctttttctttgtgaaaaatctgaattcctgtcctgaccttctgtgatgtggaaaccctaggctctgagacacactctctggtgtctgagacagaaccaaagcaataacgttgtgatgcccacaggcctggagccagctagcgaccttgtgccgcccagctgtccatggcccgtgcagagcagaggacagtgagtgtctgcactgagaaccttaaaccacagttgaacatacccacacctgtttgtcttaagctatagtgtaaaaacaaagtttgggttctgaaaatttaactgaaaaagatttccttgtttttgtaataggtgagataaagtacttagatttataaggcagcttcccctgtagtgataaattacaagcagacaatcttattttgtaatgtgatgaagtgatgatgtcttaactctacttagagagtgtatgtctgtctaacagaacaaaaagatgctctgtgtaaattccttcctgtagggcacactgcaggatttccatgtagatagaagaactatagggcctagtacagaaggtgcacacaaatgttggcaaagtcaaaaccccatgaattaaaacctactggaatttggtttttaggagtttggtaattagattatctcttttgttattttcattcagttatatcctttggctcagctagctttgaaattggctgatgaaaaaatatacataaaagggtaaaattcacacatacagcaaacaaaaatgcacaaagcctgcttcgtaacttttttttctggaattgtttttcactttgcctttttctgccaaaacaataatcaaagaactcttgctttaacctattcctgtacaaagactgtttttgaccagataatcatctgttgtggcattctatcttgtaggacactgtatattgcaaattgctgattatggaaggggccagttgctgttttttcatgcagtgccctgggagtcttaaaagcagtgcttagcaacattggtgatagcatgtggctgggacccagggcccttccccactcttcagccccgagtcatgtgtctgaggtgacggactgagacgcatctggtcctgtaattcagagagtgggcacatcaccaaagaactgcattgctgtggtcactgtttcttcaagtacacactgactctgctactttaggataaatatattttactcagaactctgaatttcacagtatacttactaaactaagtaaaaatgatacttaaaatacttattttactttctagacctaggctagatgttttaagctacagctctagttcattgtgatatttataatttgaaagctatgagaatagatgtgtgggtgaagccatagaacatatttgcttgaaattcttgagcagggatcttataaagggccagaaataagatgtgtggttcacatagatagtgagcgtaacatctgtattaaacataggagagaagtttataaagggcattggcaataaactctttgttgcagctgttttccaagcagtgtaaatactttttcctgtgattatgtatagccttggaatggcaccttttaactaacccatatgtgtttggtttcaatggttttttatattcagatgtatatatggtgctcactttaggatcagcagtgttgaccatttatgctgcatagctgtattatagccttattagttgtgtggttgacccttggggtatacaaatgtcagtctgagtggtgtcttactcctttgtttataagtgaatgattgtgcatgttttgtatgtcatagtatgtcgtcacataaaagggagggagcgaaaaaccattacattaagataatattggaccaaactacttacttgctctaaacagttacttgtaccccttaacctgtcttcaaaagttgcatatagttacagtagtgtataaattaaatattgtggaaaaacagtcttgtatttttctgtatgtgtgtatatatatataattatgtacttctggcaattctatctgtatttaaagatgtgacaatcttgacaccaattttaagaatagctgtgagaccgaattaaagataatccctaccaagtgaaaattgatgtgtgttaagagggtacagaattatcaactgatttggtcagttgcttccaatgctggttgatttccctcattgtgtaaacattgacaggtatgtgacaaatgggaaaaaaaatccaaataataaagtgacatattggtgttcagcaataaaaaaaaaaaaaaaa

SEQ ID NO: 28152 - DNA, 5228 bp, Homo Sapiens
gctttggaaccgcggcgtgagcgccccgggaagatggagcagtcgccgtccacgccaccgccgccgcccggggctcccccgtccctgcggggccagcagcagctccagccaccagtgcccggtctcccggcgcgagaggcccgggagccgccggccaggacgcccccgagggtgtagaccgcgcccctggagagagtgataatcttcaaaatgaagactttggaaaattttaggttctctataggaactacaaaaatggaaggaaagaacattttcaaaaggaaattattttgaaagtatgtttacaacaaactgatactattgacagtttttttttttaaataataaaacactttaagaagattgtatttatggtaaaaggaaactggactaacaatgaggccaaagacttttcctgccacgacttattctggaaatagccggcagcgactgcaagagattcgtgaggggttaaagcagccatccaagtcttcggttcaggggctacccgcaggaccaaacagtgacacttccctggatgccaaagtcctggggagcaaagatgccaccaggcagcagcagcagatgagagccaccccaaagttcggaccttatcagaaagccttgagggaaatcagatattccttgttgccttttgctaatgaatcgggcacctctgcagctgcagaagtgaaccggcaaatgctgcaggaactggtgaacgcaggatgcgaccaggagatggctggccgagctctcaagcagactggcagcaggagcatcgaggccgccctggagtacatcagcaagatgggctacctggacccgaggaatgagcagattgtgcgggtcattaagcagacctccccaggaaaggggctcatgccaaccccagtgacgcggaggcccagcttcgaaggaaccggcgattcgtttgcgtcctaccaccagctgagcggtaccccctacgagggcccaagcttcggcgctgacggccccacggcgctggaggagatgccgcggccgtacgtggactaccttttccccggagtcggcccccacgggcccggccaccagcaccagcacccaccagctgcatgtgctgggctcccgcagccaggtgttcgccagcgacagccccccgcagagcctgctcactccctcgcggaacagcctcaacgtggacctgtatgaattgagcagcacctccgtccagcagtggccggctgccaccctggcccgccgggactccctgcagaagccgggcctggaggcgccgccgcgcgcgcacgtggccttccggcctgactgctcagtgcccagcaggaccaactccttcaacagccaccagccgcggcccggtccgcctggcaaggccgagccctccctgcccgcccccaacaccgtgacggctgtcacggccgcgcacatcttgcacccggtgaagagcgtgcgtgtgctgaggccggagccgcagacggctgtggggccctcgcaccccgcctgggtgcccgcgcctgccccggcccccgcccccgcccccgcccccgccccggctgcggagggcttggacgccaaggaggagcatgccctggcgctgggcggcgcaggcgccttcccgctggacgtggagtacggaggcccagaccggaggtgcccgcctccgccctacccgaagcacctgctgctgcgcagcaagtcggagcagtacgacctggacagcctgtgcgcaggcatggagcagagcctccgtgcgggccccaacgagcccgagggcggcgacaagagccgcaaaagcgccaagggggacaaaggcggaaaggataaaaagcagattcagacctctcccgttcccgtccgcaaaaacagcagagacgaagagaagagagagtcacgcatcaagagctactcgccatacgcctttaagttcttcatggagcagcacgtggagaatgtcatcaaaacctaccagcagaaggttaaccggaggctgcagctggagcaagaaatggccaaagctggactctgtgaagctgagcaggagcagatgcggaagatcctctaccagaaagagtctaattacaacaggttaaagagggccaagatggacaagtctatgtttgtcaagatcaaaaccctggggatcggtgcctttggagaagtgtgccttgcttgtaaggtggacactcacgccctgtacgccatgaagaccctaaggaaaaaggatgtcctgaaccggaatcaggtggcccacgtcaaggccgagagggacatcctggccgaggcagacaatgagtgggtggtcaaactctactactccttccaagacaaagacagcctgtactttgtgatggactacatccctggtggggacatgatgagcctgctgatccggatggaggtcttccctgagcacctggcccggttctacatcgcagagctgactttggccattgagagtgtccacaagatgggcttcatccaccgagacatcaagcctgataacattttgatagatctggatggtcacattaaactcacagatttcggcctctgcactgggttcaggtggactcacaattccaaatattaccagaaagggagccatgtcagacaggacagcatggagcccagcgacctctgggatgatgtgtctaactgtcggtgtggggacaggctgaagaccctagagcagagggcgcggaagcagcaccagaggtgcctggcacattcactggtggggactccaaactacatcgcacccgaggtgctcctccgcaaagggtacactcaactctgtgactggtggagtgttggagtgattctcttcgagatgctggtggggcagccgccctttttggcacctactcccacagaaacccagctgaaggtgatcaactgggagaacacgctccacattccagcccaggtgaagctgagccctgaggccagggacctcatcaccaagctgtgctgctccgcagaccaccgcctggggcggaatggggccgatgacctgaaggcccaccccttcttcagcgccattgacttctccagtgacatccggaagcagccagccccctacgttcccaccatcagccaccccatggacacctcgaatttcgaccccgtagatgaagaaagcccttggaacgatgccagcgaaggtagcaccaaggcctgggacacactcacctcgcccaataacaagcatcctgagcacgcattttacgaattcaccttccgaaggttctttgatgacaatggctacccctttcgatgcccaaagccttcaggagcagaagcttcacaggctgagagctcagatttagaaagctctgatctggtggatcagactgaaggctgccagcctgtgtacgtgtagatgggggccaggcacccccaccactcgctgcctcccaggtcagggtcccggagccggtgccctcacaggccaatagggaagccgagggctgttttgttttaaattagtccgtcgattacttcacttgaaattctgctcttcaccaagaaaacccaaacaggacacttttgaaaacaggactcagcatcgctttcaataggcttttcaggaccttcactgcattaaaacaatatttttgaaaatttagtacagtttagaaagagcacttattttgtttatatccattttttcttactaaattatagggattaactttgacaaatcatgctgctgttattttctacatttgtattttatccatagcacttattcacatttaggaaaagacataaaaactgaagaacattgatgagaaatctctgtgcaataatgtaaaaaaaaaaaaagataacactctgctcaatgtcacggagaccattttatccacacaatggtttttgttttttattttttcccatgtttcaaaattgtgatataatgatataatgttaaaagctgctttttttggctttttgcatatctagtataataggaagtgtgagcaaggtgatgatgtggctgtgatttccgacgtctggtgtgtggagagtactgcatgagcagagttcttctattataaaattaccatatcttgccattcacagcaggtcctgtgaatacgtttttactgagtgtctttaaatgaggtgttctagacagtgtgctgataatgtattgtgcgggtgacctcttcgctatgattgtatctcttactgttttgttaaagaaatgcagatgtgtaactgagaagtgatttgtgtgtgtgtcttggttgtgattggattctttgggggggggaactgaaacatttgtcatatactgaacttatatacatcaaaagggattaatacagcgatgccaaaaagtttaatcacggacacacgtccgtttctgtagtccgtatgctctttcattcttggtagagctggtatgtggaatgccatacctctgaccctactacttacctttttactgacagactgcccacactgaaagcttcagtgaatgttcttagtcctgttttcttctgttactgtcaggaaactgagtgatctaatggttctctcactttttttttgttcttttagtgtactttgaagtatcaaatcttaacttggtttaaacaatacatattcctaacctttgtaaaaaagcaaagattcttcaaaatgacattgaaataaaaagtaagccatacgtattttcttagaagtatagatgtatgtgcgtgtatacacacacacacacacacagagataaacacaatattccttatttcaaattagtatgattcctatttaaagtgatttatatttgagtaaaaagttcaattcttttttgctttttaaaaaatctgatgcttcataattttcattatattattccacatatttttccttgaagttcttagcataatgtatccattacttagtatatatctaggcaacaacacttagaagtttatcagtgtttaaactaaaaaaataaagattcctgtgtactggtttacatttgtgtgagtggcatactcaagtctgctgtgcctgtcgtcgtgactgtcagtattctcgctattttatagtcgtgccatgttgttactcacagcgctctgacatactttcatgtggtaggttctttctcaggaactcagtttaactattatttattgatatatcattacctttgaaaagcttctactggcacaatttattattaaaattttgaatccaaaaaaaaaaaaaaa

SEQ ID NO: 28153 - DNA, 4922 bp, Homo Sapiens
agtgtcccgaggtacctagtgtctgagcggcacagacgagatctcgatcgaaggcgagatggcggacgtgctagatcttcacgaggctgggggcgaagatttcgccatggatgaggatggggacgagagcattcacaaactgaaagaaaaagcgaagaaacggaagggtcgcggctttggctccgaagaggggtcccgagcgcggatgcgtgaggattatgacagcgtggagcaggatggcgatgaacccggaccacaacgctctgttgaaggctggattctctttgtaactggagtccatgaggaagccaccgaagaagacatacacgacaaattcgcagaatatggggaaattaaaaacattcatctcaacctcgacaggcgaacaggatatctgaaggggtatactctagttgaatatgaaacatacaaggaagcccaggctgctatggagggactcaatggccaggatttgatgggacagcccatcagcgttgactggtgttttgttcggggtccaccaaaaggcaagaggagaggtggccgaagacgcagcagaagtccagaccggagacgtcgctgacaggtcctctgttgtccaggtgttctcttcaagattccatttgaccatgcagccttggacaaataggactggggtggaacttgctgtgtttatatttaatctcttaccgtatatgcgtagtatttgagttgcgaataaatgttccatttttgttttctacatttaatgttactttcctgtcctaaaattgaaagttctaaagcatagcaaggctgtatggatcattgtgaagatacttctagggactgaactctatgtatttcttttttttcttttttttgagatagagtcttgctgtgttacccagggtggattgcagctgatcatagctcactgcagcttcaaactcttgggctcaagccatccttctgcctcactgtccctagtagttgggattacaggcacatgccaccatgcccagctaaatttttaatatttttgtagagatggggtcttgctgtgttacctgggctagttatgtgagtttctatattagacatagtctcaagtttcaggtagggtttaaagtagagacactggtcagtatttcttttttggggggaactaggagagcaggagtagaagtgagatgttaagatcttatggcactaaagacttactattctgttcctacatactctgttaggatcagatagatgttatagaaatgccttttgtttctcctgcccttcttgatgtcacagttttttgtacttccagctgtctaaaggcatgaatctcctcttggagcattctcccagacccttctttagaggagtctatactaagttcttggtgccctcttcggcagccaaggtgaaggccccatagaggagaggatccaaaggagcattgaggaggcccaagaggaaaaggatgtggctcaggctgggagggacttcagttagcatggtgggggggaaccagtaccacatacccagtaggtaataaggtgtccagcagaggatgaaggtcagcaagataagcagggccagtctcagggcccggagacgaacacggggacaattgtcaaaggagcgggggagggcaaattcaccagcaggggctaggaatttagaaaatatactgtaattcagacactcagcttctgatctgagtatagggtgaattgatggaggggcatagctagtgagacagagctcgcctcctacaaggaggagaatgttgcaaaccgttttccccttcccaacctgggactatatgatttcttacccccagggattatgatagaaatatgaagccaccaagtctagacttgatggtgttcaagaataaataatactgattgcctccctagtccttgtccagctaactcagctgtttataattgaagggattcaacaaaattatctctagcatcaggtgctagacatggttagaatctcaccatggtttagtgactggtagatagctattaggtaggtagataaataaatgatgctagaggcaacaggtctagggttaaggattaaggcctgggaattggagtctcaccatggctccccttccttgtctggggcctggacacactgaggtcaatgcggctatagcagatggccatggcagtcagtggcagcagaaagaggcagcagaaggtgaagaggttataggtggtctcttgccattgagccttgaagctgcctttggtgacacactgagtgaaagggactgggccagctcagtggaccgtgtggaacaggaacagctggagtggagttgaggactattagaactggttcccctcaccacccaacctacccacctatgtcatactgtctcctcccaattcatccttaattccaagtgaagcagcacagtgctgagaaacagttcatccatggtgccatgttaaagaagttggaaatatatcttgaaaatcctatcttccttttaggcttgaatatgatgctgaacagtaagtttgttaaatcttggaacttaaaacaatcctgctttctcaagtactattctaacattgcgctttataagggatgatatttctaccacctcactcatatttttagctgaaatggttttcctggtatgtctgttattttgtggaaaaagaaatattgtgtaaaatgggtgctgccaaaattccaggccattttgcagggactctgaagtgacctttagtagtaatagtcttatgtgcagtaactataatggtaaagaatgttaaataataaaatttaacattttccaaatgctattgggctgcccctccccctttttgttaaattgctgggttttccaactgaatcagtaaaaactatttctgtttagagctacaaggttaaagtgcctgctttccagtaatggagattgagtcactattaatttgataaaaggtaagctcagtaggcatcagattcctagatacaaggcatttgggaaagtgattttagcagacatgagggacatttaggaaagatgaatagtttcagcctaagagaattttgtgaactgtttggagttacgatcaggctactctgagctagttgggaaatggtctttcctcttcccatctcttgcattcatatatttctaagtttttttttttgtttttgtttttgtgctctgcctaagaagtgcttgagaattgtgaggagtataaaaatagtcaaagctggctgggcgcggtggctcacgcctgtgatcccagcactttgggaggctgaggcgggcggatcacggggttaggagatggagaccatcctggctaacacagtgaagccctgtctgtactagggatgcagaaagctggccgggcgtggtggtgggtgcctgtagtcccagctacttgggaactcgggaggctgaggcaggagaatgacctgaacccgggaggcggagcttgcagtgggcagagattgcgccattgcactccggcctgggcgacagagtaagactgtctccaaaaaaaaaaaaaaataataatcaaagctcttggatttatagtttggtccacagccttgttttgatctttcctttatcctgttttattgccatttaccacgtactgtagaaacatccctttcaactgctgataacttggaaacaagcctacaaaaataagtaatttctaactactcctaatactacctataactacccctaagcccttaccactctaacgtgacattattaaattttttattttgttaacactaatattttaactacaattacagcatatgggcaatacagaatttacctaaaaggatactaatttggaacaaaaaaaatcacctttcgcacatgtatcatgtcacaaccagtttgccattgaaacaaatagaggttgcaaatattgtcagattgtcaggctgtaagaaaggatgaaattcatttcccattgcatcatcttgtggcccatggatttcaagtgccttagccaaaatcatatagctagttagcagtagagccgagactcagaaaaaaacaaagtaaaacaggcagactgaaacaaaaagtcttctaattcccagtccacatgtaaaatttgcttcatataaacaaacctaattgtaaatggcactgtagcaacaggcttctttttaacacttggattggtaaaggtcttgtttgcaacatattagaagtattatttttctctttccccccaaccccacccccaacagagtctggctctgccgcccacgccggagtgcagtggtgcagtcttggctcgctgcggcctccacttcccgggttcgggcagttctcgtgcctcagcctcctgagtagttgggattacaggtgctcaccactatacccggctagtttttgtatttttagtagagatggggtttcgtcatgttggccaggttggtcttaaactcctgacctcaagtgatccgcccaccttggccttccagaatgctgggattacaggcttgagccaccaggcctttctttgttcttaggagtatagtcagactaacttctagtagttatatttctaataattgaggatgtaagtaaggatcaaatcttaaatcagtataatgcattgtcattccagagataaatcctagacccttcttggcctccttctgacataattctaatcctacagtctcagagatgctgttgtatcctgccccccaaccccatgatagtgatagtggtttttgccttgaaggaattgctttgtatttagcttttccccctctagatttctagttccttttcagtattggattggatttgagatttgattaacctagtactcaggttcagatgctcgcctctttgcaattttaacactcattcgacaataaagtcagtaaaaaacacaaaaaaaaaaaaaaaa

SEQ ID NO: 28154 - DNA, 4329 bp, Homo Sapiens
gaggagcggcgaaagcggaagccatgttggagtttcaccccgagcgaggggctgcgagggttctcctctccttgtgggtgtgaccaggttcggcgcggcggcgggccgcggggggcggggacgattggccgcttgtcgtcgtccgcagcggcgtgaggggagcggcggcggcggcggcggcggccgcagcgtggagccgggtgattgtgaccgccgggggagccgggagccggccgcggcgccctctctccgtgtggccccctgagcggcccccctcccctgcccgggagggaggcggggggcacctggggcccgccatgaaccccggcttcgatttgtcccgccggaacccgcaggaggacttcgagctgattcagcgcatcggcagcggcacctacggcgacgtctacaaggcacggaatgttaacactggtgaattagcagcaattaaagtaataaaattggaaccaggagaagactttgcagttgtgcagcaagaaattatcatgatgaaagactgtaaacacccaaatattgttgcttattttggaagctatctcaggcgagataagctttggatttgcatggagttttgtggaggtggttctttacaggatatttatcacgtaactggacctctgtcagaactgcaaattgcatatgttagcagagaaacactgcagggattatattatcttcacagtaaaggaaaaatgcacagagatataaagggagctaacattctattaacggataatggtcatgtgaaattggctgattttggagtatctgcacagataacagctacaattgccaaacggaagtctttcattggcacaccatattggatggctccagaagttgcagctgttgagaggaaggggggttacaatcaactctgtgatctctgggcagtgggaatcactgccatagaacttgcagagcttcagcctcctatgtttgacttacacccaatgagagcattatttctaatgacaaaaagcaattttcagcctcctaaactaaaggataaaatgaaatggtcaaatagttttcatcactttgtgaaaatggcacttaccaaaaatccgaaaaaaagacctactgctgaaaaattattacagcatccttttgtaacacaacatttgacacggtctttggcaatcgagctgttggataaagtaaataatccagatcattccacttaccatgatttcgatgatgatgatcctgagcctcttgttgctgtaccacatagaattcactcaacaagtagaaacgtgagagaagaaaaaacacgctcagagataacctttggccaagtgaaatttgatccacccttaagaaaggagacagaaccacatcatgaacttgatctgcaactggaatatggacaaggacaccaaggtggttactttttaggtgcaaacaagagtcttctcaagtctgttgaagaagaattgcatcagcgaggacacgtcgcacatttagaagatgatgaaggagatgatgatgaatctaaacactcaactctgaaagcaaaaattccacctcctttgccaccaaagcctaagtctatcttcataccacaggaaatgcattctactgaggatgaaaatcaaggaacaatcaagagatgtcccatgtcagggagcccagcaaagccatcccaagttccacctagaccaccacctcccagattacccccacacaaacctgttgccttaggaaatggaatgagctccttccagttaaatggtgaacgagatggctcattatgtcaacaacagaatgaacatagaggcacaaacctttcaagaaaagaaaagaaagatgtaccaaagcctattagtaatggtcttcctccaacacctaaagtgcatatgggtgcatgtttttcaaaagtttttaatgggtgtcccttgaaaattcactgtgcatcatcatggataaacccagatactagagatcagtacttgatatttggtgccgaagaagggatttataccctcaatcttaatgaacttcatgaaacatcaatggaacagctattccctcgaaggtgtacatggttgtatgtaatgaacaattgcttgctatcaatatctggtaaagcttctcagctttattcccataatttaccagggctttttgattatgcaagacaaatgcaaaagttacctgttgctattccagcacacaaactccctgacagaatactgccaaggaaattttctgtatcagcaaaaatccctgaaaccaaatggtgccagaagtgttgtgttgtaagaaatccttacacgggccataaatacctatgtggagcacttcagactagcattgttctattagaatgggttgaaccaatgcagaaatttatgttaattaagcacatagattttcctataccatgtccacttagaatgtttgaaatgctggtagttcctgaacaggagtaccctttagtttgtgttggtgtcagtagaggtagagacttcaaccaagtggttcgatttgagacggtcaatccaaattctacctcttcatggtttacagaatcagataccccacagacaaatgttactcatgtaacccaactggagagagataccatccttgtatgcttggactgttgtataaaaatagtaaatctccaaggaagattaaaatctagcaggaaattgtcatcagaactcacctttgatttccagattgaatcaatagtgtgcctacaagacagtgtgctagctttctggaaacatggaatgcaaggtagaagttttagatctaatgaggtaacacaagaaatttcagatagcacaagaattttcaggctgcttggatctgacagggtcgtggttttggaaagtaggccaactgataaccccacagcaaatagcaatttgtacatcctggcgggtcatgaaaacagttactgagaattgttgtgctttgacagttaactctagaaagaaagaacactaccactgcaacattaatggatgcttgaagctgtacaaaagctgcagtaacctgtcttcagttactttgtaatttattgtggcatgagataagatggggaaaattttgttttaagtggtatggatatatttagcatattgaaccacacaagtgcttaattcattgttatgtaatctttgtacatataggcagtattttttctgtgaaacttcatattgctgaagacatacactaagaatttatgtagataatgtacttttatgagatgtacaagtaagtgtcttatctgtacagatgtaaatgttgatgaaaatgcaattggggttaatattttaagaattctttagtatattcttgggtgtggctatattacaaaatgggatgctggcaatgaaacaatacatttaacactattgtatttttattatatgtaatttagtaatatgaatataaatcttgtaacttttaaaattgtaatggaggctgtaatcattttataatctttttaattttaatgcaagtacactggtgtttatatttgcacagagtattgatatgtgatgtattaagtcacaaaagtaagctgtgacattgtctataagcatttggctccacaaatgtatttggattgttttctatgtgaagcaaaccaattataattaaccacatgttgtagtaactggtctttttatatttaagcagaatcctgtaagattgcttgtctttgcttaaaaacaatacctttgaacatttttgaatcacagaatagcggtaccatgatagaatactgcaattgtggtcagaattacagtatgcacaaagaattaattagcattattaaagagtcctcactaaacatttcatatgatcacactgaagaactgtaacattccatagagtgaagtggttcaaatttctcttggaatttttacttttgttggccttattttatgatccttttcatatttcttttgacttagagtattaatacatggccaaaataatttagttactacctcatacaaacaatataatggttactacacatcacaggaacttagttttggtttaagtcatttttgattgcttttttccaatggaatatgtatataccaggttttagcaaaatgcacacttttggctctttttggtatatgttctttatattttaatgtgagtatatacactaagaacaaactaaattgtgatttatgatcttcatttattttaatggtaatggttttaaaatatgttcctgattgtacatattgtaaaataaacatgttttttaaaaaaaaaaaaaaaaaaaaaaaaaaaaaaaaaaaaaaaaaaaaaaaaaaaaaaaaa

SEQ ID NO: 28155 - DNA, 4079 bp, Homo Sapiens
agcctaagctggtgaactgggccaggcaccgctccggtgcctgccggagcctggcgatccagctgcacgtctgcgggggcctctgtgtcagagcggcggccgtttgcaggctgggaagctgccgcaccgggaggctgagactgcattgttgggatttgatgcactaatctcctgtctccgccgcctttccctctgttcggtctcttgccctccctcccttcgtctgtccttcctccgtgtgtttgtctatcctcctctgtccctcctctttcctctccttgctttctttggttttctgcaatgatgagacaggcaccgacagcccgaaagaccacaactcggcgacccaagcccacgcgcccagccagtactggggtggctggggccagtagctccctgggcccctctggctcagcgtcagcaggtgagctgagcagcagtgagcccagcaccccggctcagactccgctggcagcacccatcatccccacgccggtcctcacctctcctggagcagtccccccgcttccttccccatccaaggaggaggagggactaagggctcaggtgcgggacctggaggagaaactagagaccctgagactgaaacgggcagaagacaaagcaaagctaaaagagctggagaaacacaaaatccagctggagcaggtgcaggaatggaagagcaaaatgcaggagcagcaggccgacctgcagcggcgcctcaaggaggcgagaaaggaagccaaggaggcgctggaggcaaaggaacgctatatggaggagatggctgatactgctgatgccattgagatggccactttggacaaggagatggctgaagagcgggctgagtccctgcagcaggaggtggaggcactgaaggagcgggtggacgagctcactactgacttagagatcctcaaggctgagattgaagagaagggctcagatggcgctgcatccagttatcagctcaagcagcttgaggagcagaatgcccgcctgaaggatgccctggtgaggatgcgggatctttcttcctcagagaagcaggagcatgtgaagctccagaagctcatggaaaagaagaaccaagagctggaagttgtgaggcaacagcgggagcgtctgcaggaggagctaagccaggcagagagcaccattgatgagctcaaggagcaggtggatgctgctctgggtgctgaggagatggtggagatgctgacagatcggaacctgaatctggaagagaaagtgcgcgagttgagggagactgtgggagacttggaagcgatgaatgagatgaacgatgagctgcaggagaatgcacgtgagacagaactggagctgcgggagcagctggacatggcaggcgcgcgggttcgtgaggcccagaagcgtgtggaggcagcccaggagacggttgcagactaccagcagaccatcaagaagtaccgccagctgaccgccaatctacaggatgtgaatcgggaactgacaaaccagcaggaagcatctgtggagaggcaacagcagccacctccagagacctttgacttcaaaatcaagtttgctgagactaaggcccatgccaaggcaattgagatggaattgaggcagatggaggtggcccaggccaatcgacacatgtccctgctgacagccttcatgcctgacagcttccttcggccaggtggggaccatgactgcgttctggtgctgttgctcatgcctcgtctcatttgcagggcagagctgatccggaagcaggcccaggagaagtttgaactaagtgagaactgttcagagcggcctgggctgcgaggagctgctggggagcaactcagctttgctgctggactggtgtactcgctgagcctgctgcaggccacgctacaccgctatgagcatgccctctctcagtgcagtgtggatgtgtataagaaagtgggcagcctgtaccctgagatgagtgcccatgagcgctccttggatttcctcattgaactgctgcacaaggatcagctggatgagactgtcaatgtggagcctctcaccaaggccatcaagtactatcagcatctgtacagcatccaccttgccgaacagcctgaggactgtactatgcagctggctgaccacattaagttcacgcagagtgctctggactgcatgagtgtggaggtaggacggctgcgtgccttcttgcagggtgggcaggaggctacagatattgccctcctgctccgggatctggaaacttcatgcagtgacatccgccagttctgcaagaagatccgaaggcgaatgccagggacagatgctcctgggatcccagctgcactggcctttggaccacaggtatctgacacgctcctagactgcaggaaacacttgacgtgggtcgtggctgtgctgcaggaggtggcagctgctgctgcccagctcattgccccactggcagagaatgaggggctacttgtggctgctctggaggaactggctttcaaagcaagcgagcagatctatgggaccccctccagcagcccctatgagtgtctgcgccagtcatgcaacatcctcatcagtaccatgaacaagctggccacagccatgcaggagggggagtatgatgcagagcggccccccagcaagcctccaccggttgaactgcgggctgctgcccttcgtgcagagatcacagatgctgaaggcctgggtttgaagctcgaagatcgagagacagttattaaggagttgaagaagtcactcaagattaagggagaggagctaagtgaggccaatgtgcggctgagcctcctggagaagaagttggacagtgctgccaaggatgcagatgagcgcatcgagaaagtccagactcggctggaggagacccaggcactgctgcgaaagaaggagaaagagtttgaggagacaatggatgcactccaggctgacatcgaccagctggaggcagagaaggcagaactaaagcagcgtctgaacagccagtccaaacgcacgattgagggactccggggccctcctccttcaggcattgctactctggtctctggcattgctggtggagccatccctgggcaggctccagggtctgtgccaggcccagggctggtgaaggactcaccactgctgcttcagcagatctctgccatgaggctgcacatctcccagctccagcatgagaacagcatcctcaagggagcccagatgaaggcatccttggcatccctgccccctctgcatgttgcaaagctatcccatgagggccctggcagtgagttaccagctggagcgctgtatcgtaagaccagccagctgctggagacattgaatcaattgagcacacacacgcacgtagtagacatcactcgcaccagccctgctgccaagagcccgtcggcccaacttatggagcaagtggctcagcttaagtccctgagtgacaccgtcgagaagctcaaggatgaggtcctcaaggagacagtatctcagcgccctggagccacagtacccactgactttgccaccttcccttcatcagccttcctcagggccaaggaggagcagcaggatgacacagtctacatgggcaaagtgaccttctcatgtgcggctggttttggacagcgacaccggctggtgctgacccaggagcagctgcaccagcttcacattcgcctcatctcctaagcactcctttcccctgctgtccccttcgaccctcagccctctggtgccgctctgcccgatgcacagccacctcagccagcccccaggtagaaacgtgggttaagctcttcctgccccgttcagcttcactcccaccctttcagcgtcctgccccttcaccttgacccgggttcccccactcccattccctggcctctgccataatttgttgttcaactgctccctccttcctgaggggcctcagggcttgtggggggtaggctgagaccccaccaccaaaggttaagtgaggtccccttgattgaggacttcaccccttgattaaagcaacttctgcttcaggaaaaaaaaaaaaaaaa

SEQ ID NO: 28156 - DNA, 5403 bp, Homo Sapiens
acgagagtttgcacagatgtggaaaggagctggcagggcagttccctgggacagaagggagtcagggggtccaacaggggccccccactgccaccccagagcctccagtccagctttagccaggggccccggggggcctgtgggaagtgccaggggcccccaagcacactctgctctcattggctggctgcgcctacatgcaaatgagggccaacgtcacttcctgaggccaatcgagcgccattttctctttctggctgcgcgggaggaggggaccagtcgcgctgggggtgggcgcgcgctgaggcgggggtcccgccgcgcggggcggaggcgcgggcgggcgcaggcggccccacgggacgcggctgcgctcggcggaagacgcggcagccctgcgagaggcagcagcggagacgcggtgctcctcgggcgccaagcggaaaatttcaaaaatgtttcaaattcctgtggaaaatcttgacaacatcagaaaggtgcgaaaaaaggtgaaaggtattcttgtggatattgggcttgacagctgcaaggagttactgaaggaccttaaaggctttgatccaggagagaaatactttcataacacatcatggggagatgtttctctctgggaaccttctggaaagaaagtgagatatcgaacaaagccatactgttgtggcctctgtaaatactctacaaaggtgcttacttcattcaagaatcatttacatcgttaccatgaagatgaaattgaccaagagctggtgatcccttgcccaaactgtgtatttgcatctcagcccaaagttgtgggaaggcacttcagaatgttccatgcgcctgtccggaaagtccagaactacacagtgaatattttaggtgaaactaaatcatctaggagcgatgtgataagtttcacatgtctaaaatgtaacttttcaaacactttgtactacagcatgaagaagcatgtgctggtagcccattttcactacttaattaactcctactttggcctaagaactgaggaaatgggtgagcaaccgaaaactaacgatactgtttctatagagaagatcccaccacctgacaaatattactgtaaaaagtgcaacgccaatgccagcagccaggatgcgttaatgtatcacattttgacatcagacatacacagagatttggagaataagcttagatctgtgatttcagaacatattaagaggactggactcttgaagcaaacgcacattgctccaaaaccagcagcacatttggctgcaccagcaaatggcagtgctccaagcgctccagcgcagcctccttgcttccatcttgctttgccacagaacagtccaagcccagccgcaggacagccagtgactgtggcccagggtgcccctggaagcctcactcattccccccctgctgctggccaatcccacatgactctggtctccagccctctgcctgtgggccagaacagcctcaccctgcagcccccagcacctcagcccgtctttctttctcacggggttccacttcatcagtctgtgaatcctcctgtgttgcccttgagtcagccagtcggacctgtcaataagtctgttggaactagtgtcctccccataaatcagactgttcgccctggggttttacccctcacccagcctgtgggacccataaacagacctgttgggcctggtgttcttcctgtgagcccctctgtcacccctggggtcctgcaggctgtctcgccaggggtgctttctgtgagtcgggcggtcccgtctggagtccttcctgcaggccagatgactcctgcaggccagatgactcctgcaggggttatccctgggcaaacagcaacttctggggttcttcctactggccagatggtccagtcaggagttctccctgtgggccagacagctccgtcacgggttcttcccccaggccagacagccccattgagggttatctctgcaggccaggtggtcccgtctgggcttctttctcccaaccagacagtctcctcctcagctgttgtgcctgtaaaccagggtgtgaattctggtgttctgcagcttagtcagcctgttgtgtcgggagttcttcctgtgggccagccagtgaggcctggggtcttgcaactcaaccagactgtgggcaccaacattctgcctgtgaatcagccagtgagacctggtgcttcgcagaacaccaccttcctgacatcaggctctattctcagacagctcatccctacagggaaacaagtgaatgggattccaacctacacgctggcccccgtgtctgtcactctgccggttccccctggaggccttgcaactgtcgctccgccccagatgcccatccagctcctgccgtcaggtgcagctgcaccaatggccggttccatgcccggcatgccctctcctccagtgctggtgaatgctgctcagagcgtgtttgttcaggcctcctcctctgcagcagacacaaaccaggtgctcaaacaggccaagcagtggaagacctgccctgtctgcaacgagctctttccgtccaacgtctaccaggtccacatggaggtagcgcataagcacagcgagtccaagtctggtgagaaacttgagcctgaaaaactggcagcgtgtgcaccatttctaaagtggatgagagagaaaacggtgcgatgtctgtcttgtaagtgcttggtctctgaggaagagcttatacaccacttgctgatgcatggcttggggtgcttgttctgtccatgcaccttccatgatatcaaaggtctttcagagcacagcaggaataggcacctggggaagaagaagttgcctatggattatagcaacagaggttttcaattagatgtcgatgccaatggcaacctgctctttccccaccttgatttcatcaccatattgccaaaggagaagcttggggagcgggaagtctacttggcaatcctggctgggatacactccaagtcactggtgcctgtgtatgtgaaggtgaggcctcaggctgagggcacccccgggagcaccggcaagcgagtgtccacctgccccttttgctttggcccctttgtgacaactgaggcctatgagctgcatttgaaggagaggcaccacatcatgcccacagtccacacggtcctgaagtctcccgccttcaagtgcatccactgctgtggggtctacacgggaaatatgaccctggctgccatcgccgtccatttggtgcgctgcagaagtgctcccaaggacagcagctcagacctgcaggcccagccgggttttattcacaacagtgaactgcttttagtcagtggtgaagtgatgcatgattccagtttttctgttaagagaaagctgcctgacggccacttaggggccgaagaccagcggcatggggaggagcagcctcccatcctaaatgccgatgcagccccgggtccagaaaaggtgacgagtgttgtgccttttaaaagacaaaggaatgaaagcagaacagagggacctattgtcaaggacgaggctcttcagattttagcattagatcctaaaaaatatgaaggccgttcttatgaagaaaagaagcaatttcttaaagattatttccataagaaaccatatcctagtaaaaaggaaatagaactgttgtcctcactcttttgggtgtggaaaattgatgtggcttcattttttggaaaaagaaggtatatttgcatgaaagcaataaaaaatcacaagccttctgtacttttaggctttgatatgtctgaacttaaaaatgtgaaacatagattgaactttgaatatgaaccataaaacttgcaaaaaaaaaaaaaaagtaactctaaagtagtaggtagatttttttcagttgaaatttcacagtgttgtcctcactgtgttggtgaatcaacctcagtggtcactgtgctgctctgcagagttacttcaggtgctggagagacccctgttaccaggaagccagtagttatttcacatctattgtttcctgcagtttgatttgtaacagaacagttgttttcaggtttttttctctgtcatgtaaatgaaatcttttgatatttcatgcacgccttgttttcccactagtgtcagtatcgtatgataagaaactgaaatctataaataatttgctttttcattaaggacatttcagcctttttcagaatacttgatttaactgcgagtggaagcatcgatctccttcagctttccctgtagcagcagatggtacagtgagtgttcagagacgtgggtacaaaccctgtgatgtatgtataaggctccctgaggatgcactgcattaacttacgctgacttctttgtaagatctttgcttatagattataatttagatctgtatttttttaggtttatcctaatagctgttttttttttttaaccataactcatagaaaatcaaatgtttttatttgttaaaagtagactgaatttgacatctggtatgctggtatgtagctcatacatcaagagttattttacaaataaatttattctgtagatgcagaaatatttttcagtgtagattttcccttttgatatgctaagtcatttctccgttcagaggtaaaacaataaatttttagtgcctttagaataaacattgaaagaatacaccccaaaactcttctcctaacttaactactcataaactagtgaaagggaaggtctatgatactcaggaataaaattattgcccctgagtgtgaaaactaacttaaatttcagcatagggtttcaggggacatggcgaagtttacagactgagatctcagtctccatggttggtacagtaagtctttgaccacattttctgaaggtcatgtttagtggagaaacgggcttttctctagctggtttaggctggaagctgtgtccgggtcgatgggatggcatattgttaaagaatctccattgtcgtcactgtcctgtggatgttaaacctcgtttttttccccacacgatattaaaacttaaagcaccagaaccagtcatggagaccagccagtttagatggtaagtcatatttctggtggtacacagcagaggaaccccttcactctatctttaggtagaaatatttggaggatgtgacagcctctgagaaacataatgttactatgtggattttaaaaaatataatacttgcatgtaattgctataatgttcatatttgaggcagttgtgaaaccggtttatgattgttggtgtactctgttgtaaattcaaagagagcttgttgaacattttttttttttacctattgttttcagagtgtctattttgaattaaaatttgttacaccgctgcaaaaaaaaaaaaaaaa

SEQ ID NO: 28157 - DNA, 4268 bp, Homo Sapiens
ccgggcgaggcgcctgttgattggccactggggcccgggttcctccggcggagcgcgcctccccccagatttcccgccagcaggagccgcgcggtagatgcggtgcttttaggagctccgtccgacagaacggttgggccttgccggctgtcggtatgtcgcgacagagcaccctgtacagcttcttccccaagtctccggcgctgagtgatgccaacaaggcctcggccagggcctcacgcgaaggcggccgtgccgccgctgcccccggggcctctccttccccaggcggggatgcggcctggagcgaggctgggcctgggcccaggcccttggcgcgctccgcgtcaccgcccaaggcgaagaacctcaacggagggctgcggagatcggtagcgcctgctgcccccaccagttgtgacttctcaccaggagatttggtttgggccaagatggagggttacccctggtggccttgtctggtttacaaccacccctttgatggaacattaatccgcgagaaagggaaatcagtccgtgttcatgtacagttttttgatgacagcccaacaaggggctgggttagcaaaaggcttttaaagccatatacaggtaggcacaacttacgtaacagataagagtgaagaagataatgaaattgagagtgaagaggaagtacagcctaagacacaaggatctaggcgaagtagccgccaaataaaaaaacgaagggtcatatcagattctgagagtgacattggtggctctgatgtggaatttaagccagacactaaggaggaaggaagcagtgatgaaataagcagtggagtgggggatagtgagagtgaaggcctgaacagccctgtcaaagttgctcgaaagcggaagagaatggtgactggaaatggctctcttaaaaggaaaagctctaggaaggaaacgccctcagccaccaaacaagcaactagcatttcatcagaaaccaagaatactttgagagctttctctgcccctcaaaattctgaatcccaagcccacgttagtggaggtggtgatgacagtagtcgccctactgtttggtatcatgaaactttagaatggcttaaggaggaaaagagaagagatgagcacatgaggaggcctgatcaccccgattttgatgcatctacactctatgtgcctgaggatttcctcaattcttgtactcctgggatgaggaagtggtggcagattaagtctcagaactttgatcttgtcatctgttacaaggtggggaaattttatgagctgtaccacatggatgctcttattggagtcagtgaactggggctggtattcatgaaaggcaactgggcccattctggctttcctgaaattgcatttggccgttattcagattccctggtgcagaagggctataaagtagcacgagtggaacagactgagactccagaaatgatggaggcacgatgtagaaagatggcacatatatccaagtatgatagagtggtgaggagggagatctgtaggatcattaccaagggtacacagacttacagtgtgctggaaggtgatccctctgagaactacagtaagtatcttcttagcctcaaagaaaaaaaggaagattcttctggccatactcgtgcatatggtgtgtgctttgttgatacttcactgggaaagtttttcataggtcagttttcagatgatcgccattgttcgagatttaggactctagtggcacactatcccccagtacaagttttatttgaaaaaggaaatctctcaaaggaaactaaaacaattctaaagagttcattgtcctgttctcttcaggaaggtctgatacccggctcccagttttgggatgcatccaaaactttgagaactctccttgaggaagaatattttagggaaaagctaagtgatggcattggggtgatgttaccccgggtgcttaaaggtatgacttcagagtctgattccattgggttgacaccaggagagaaaagtgaattggccctctctgctctaggtggttgtgtcttctacctcaaaaaatgccttattgatcaggagcttttatcaatggctaattttgaagaatatattcccttggattctgacacagtcagcactacaagatctggtgctatcttcaccaaagcctatcaacgaatggtgctagatgcagtgacattaaacaacttggagatttttctgaatggaacaaatggttctactgaaggaaccctactagagagggttgatacttgccatactccttttggtaagcggctcctaaagcaatggctttgtgccccactctgtaaccattatgctattaatgatcgtctagatgccatagaagacctcatggttgtgcctgacaaaatctccgaagttgtagagcttctaaagaagcttccagatcttgagaggctactcagtaaaattcataatgttgggtctcccctgaagagtcagaaccacccagacagcagggctataatgtatgaagaaactacatacagcaagaagaagattattgattttctttctgctctggaaggattcaaagtaatgtgtaaaattatagggatcatggaagaagttgctgatggttttaagtctaaaatccttaagcaggtcatctctctgcagacaaaaaatcctgaaggtcgttttcctgatttgactgtagaattgaaccgatgggatacagcctttgaccatgaaaaggctcgaaagactggacttattactcccaaagcaggctttgactctgattatgaccaagctcttgctgacataagagaaaatgaacagagcctcctggaatacctagagaaacagcgcaacagaattggctgtaggaccatagtctattgggggattggtaggaaccgttaccagctggaaattcctgagaatttcaccactcgcaatttgccagaagaatacgagttgaaatctaccaagaagggctgtaaacgatactggaccaaaactattgaaaagaagttggctaatctcataaatgctgaagaacggagggatgtatcattgaaggactgcatgcggcgactgttctataactttgataaaaattacaaggactggcagtctgctgtagagtgtatcgcagtgttggatgttttactgtgcctggctaactatagtcgagggggtgatggtcctatgtgtcgcccagtaattctgttgccggaagataccccccccttcttagagcttaaaggatcacgccatccttgcattacgaagactttttttggagatgattttattcctaatgacattctaataggctgtgaggaagaggagcaggaaaatggcaaagcctattgtgtgcttgttactggaccaaatatggggggcaagtctacgcttatgagacaggctggcttattagctgtaatggcccagatgggttgttacgtccctgctgaagtgtgcaggctcacaccaattgatagagtgtttactagacttggtgcctcagacagaataatgtcaggtgaaagtacattttttgttgaattaagtgaaactgccagcatactcatgcatgcaacagcacattctctggtgcttgtggatgaattaggaagaggtactgcaacatttgatgggacggcaatagcaaatgcagttgttaaagaacttgctgagactataaaatgtcgtacattattttcaactcactaccattcattagtagaagattattctcaaaatgttgctgtgcgcctaggacatatggcatgcatggtagaaaatgaatgtgaagaccccagccaggagactattacgttcctctataaattcattaagggagcttgtcctaaaagctatggctttaatgcagcaaggcttgctaatctcccagaggaagttattcaaaagggacatagaaaagcaagagaatttgagaagatgaatcagtcactacgattatttcgggaagtttgcctggctagtgaaaggtcaactgtagatgctgaagctgtccataaattgctgactttgattaaggaattatagactgactacattggaagctttgagttgacttctgacaaaggtggtaaattcagacaacattatgatctaataaactttattttttaaaaatgaaaaaaaaaaaaaaaaaaaaaaaaaaaaaaaaaaaaaaaaaaaaaaaaaaaaaaaaaaaaaaaaaaaaaaaaaaaaaaaaaaaaaaaaaaaaaaaaaaaaaaaaaaaa

SEQ ID NO: 28158 - DNA, 4782 bp, Homo Sapiens
gcagcggcggcggcgcggaggggaaggctccgcactgcccggccggtctcggccccggcgccatgagtggcggcggcggcggagggggctcggcgcccagtcgcttcgccgactactttgtcatctgcggactggacacggagaccgggctggagccggacgagctgtcggcattatgccagtacatacaggcttctaaagccagggatggtgccagccctttcatttcaagtacgactgaaggagaaaattttgagcagacaccattgagaagaacattcaaatctaaggtccttgcacgatatcctgagaacgtagaatggaatccctttgaccaagatgcagtaggaatgctatgtatgccgaaagggctggcattcaagacccaggctgatcccagggagccccaattccatgcctttattatcacaagggaggatggctctcggacatttgggtttgccctcacattttatgaagaggtgactagcaagcagatctgcagtgcaatgcagaccctctaccacatgcacaatgctgagtatgatgtcctacatgctccccctgctgatgacagagaccagagcagcatggaggatggtgaagacactcctgtgaccaaactgcagcgcttcaactcctatgacattagccgggacactctctacgtctctaagtgcatctgcctcatcacacccatgtctttcatgaaggcatgtcggagcgtgctgcagcaactccaccaggcagtcacttcacctcagccccctccactgccccttgagagctacatatacaacgtactctacgaggtgccgctcccacctcctggccggtccttgaagttttctggggtctatgggccaataatctgccagagaccaagtaccaatgagcttcccctatttgactttcctgtcaaagaggtttttgaactgctcggggtggagaatgtgtttcagctttttacttgtgcccttctggagtttcaaatcctgctctactcacagcattaccagagactgatgactgtggcggagacgattacagctctcatgtttcctttccagtggcagcatgtctatgtccctattctcccagcttctctcctgcatttcttagatgctcctgttccatacctgatgggtttgcattccaatggcctggatgaccggtcaaagctggagctgcctcaagaggctaacctctgctttgtggacattgacaaccacttcattgagttgccagaggacttgccacagttccccaacaaattggagtttgtccaggaagtctctgagattctcatggcatttggaattccccctgaagggaatcttcattgcagtgagagtgcctccaagctgaagaggctgcgggcctctgagcttgtctcggacaagaggaatgggaacattgctggctcccctttgcattcctacgagcttcttaaggagaatgaaactattgcccggctgcaagccttggtcaagagaactggggtgagcctggaaaagttggaagtgcgtgaagaccccagcagcaataaggatctcaaagttcagtgtgatgaagaagaactcaggatttaccagctaaacattcagatccgggaagtttttgcaaatcgtttcactcagatgtttgcagattatgaggtgtttgtcatccaacccagccaggataaggaatcctggtttaccaacagggagcaaatgcaaaactttgataaagcatcttttctgtcagatcagcctgagccctacctgcccttcctctcaagattcctggagacccagatgtttgcatctttcattgacaacaaaataatgtgtcatgatgatgatgataaagaccctgtactccgggtatttgattcccgagttgacaagatcaggctgttgaatgttcggacacctactctccgtacatccatgtaccagaagtgtaccactgtggatgaagcagagaaagcaattgagctgcgtctggcaaaaattgaccatactgcaattcacccacatttacttgacatgaagattggacaagggaaatatgagccgggcttcttccctaagctgcagtctgatgtactttccactgggccagccagcaacaagtggacgaaaaggaatgcccctgcccagtggaggcggaaagatcggcagaagcagcacacagaacacctgcgtttagataatgaccagagggagaagtacatccaggaagccaggactatgggcagcactatccgccagcccaaactgtccaacctctctccatcagtgattgcccagaccaattggaagtttgtagagggcctgctgaaggaatgccgcaataagaccaagaggatgctggtggaaaagatgggccgagaagctgtggagctagggcatggggaggtgaacatcacaggggtggaagagaacaccctgattgccagcctttgtgatctcctggaaaggatctggagtcatggactacaagtgaaacaggggaaatcagccttatggtcccacctgttacattatcaggacaaccggcagagaaaactcacatcaggaagcctcagtacctcaggaatacttcttgattcagaacgtaggaagtctgatgccagctcactcatgcctcccctgaggatctccctgattcaggatatgaggcacatccagaacatcggggaaatcaagactgatgtgggaaaggccagagcatgggtgcgactgtccatggaaaaaaagttactttccagacacctgaagcagctcctctcagaccatgagctcaccaaaaagttatataagcgctatgccttcctgcgctgtgatgacgagaaggagcagttcctctatcacctcctgtctttcaatgccgtcgattacttttgcttcaccaatgtcttcacaactatcctgatcccgtaccacattctgatcgtaccaagcaagaagctggggggctccatgttcactgccaacccatggatctgtatatcaggagaattgggtgagacacagatcatgcagattcccaggaatgtgctagagatgaccttcgagtgccagaacttggggaagcttactactgtccagattggccatgataactctgggctgtatgccaaatggctggtggagtatgtgatggtcaggaatgagatcacaggacatacctacaagttcccgtgtggccggtggttagggaagggcatggatgatggaagcctggagcggatcctagttggggagctgctcacatcccagcctgaggtggatgagaggccatgccggaccccgccgctgcagcagtcccccagtgtcatccggaggcttgttaccatctcacccaacaacaagcccaagctgaacactgggcagatccaggagtccatcggggaggcagtcaatggcattgtgaagcacttccataagcctgagaaagagcgaggcagtctgacgctgttgctctgtggagagtgtggccttgtctcggccttggaacaggctttccagcatggatttaaatcgccccggctcttcaaaaatgtcttcatttgggatttcctggaaaaagcacaaacctattatgagacattagagaagaatgaagtagtccctgaggaaaactggcatacaagagcccggaacttctgccgatttgtcactgcaatcaacaatactccccggaacatcggcaaggatggcaagtttcagatgctggtgtgcttgggagccagagatcacctcctacaccactggattgccctgctggctgactgccccatcactgcacacatgtatgaggatgtggcactgatcaaagaccatacacttgtcaattccttgattcgtgtgctgcagacattgcaggagttcaacatcacgctggagacgtcccttgtcaagggcatcgacatctgacctcccagcaccagccagcagcaggactgagaaagactcaccctgcagctctgaccttttttcccaaagggacttaagcgattgtgcaggagtaggagacaaaatgtacactcactgtaaaaagaaaactagaggatttttggaataaataatctattttagagtttatttgctgatttgctttttacacactttcatgtgaaagagtgatagggagagggagcgaggctggtgccgcttattttgaagctggtgccctccctcgccgtggccacatgctggaagcctgaggcctccctggactgagcctgtggcactgcgtgcgggacagttatgtttccttgccccgtcgcattaatgaggcccttccacatcatttttaaactaatgtttttctatattaacattattatggatatttggctttcataggccacacacaggtgtgctgcgcgggaagccccatgctccaatcaaagggatttttagtagtgcctctaagcaagcaccgatgagtcagtcccacgtattttcttttttgtcagtattgtttgggaaggagacatgccgggatgtgtcatcgtgccaaataccacatttcctgttggcacagtttcacagaagtaaacataagcatgttttaacaggtttttcttttcttttttcttttttaaaatgttttatttatttaacctgccattgtgtgtttttaagtattttctttttttaaggaaaggaaaagcttgtcacaatctaactggctatgttattattattaaatttatgttttgcaacttagaaaccagctacagtatggcccacttaataaaacacctgaaacaaaaaaaaaaaaaaa

SEQ ID NO: 28159 - DNA, 4848 bp, Homo Sapiens
gctcggcgaacatggcggcggcgacggtcgggcgggacactttacctgagcattggtcctacggggtgtgccgggatggccgcgtcttcttcatcaatgaccagctccgctgcacgacctggctgcatccgcgcaccggggagcccgtcaactcgggccacatgatccgctcagacctgccccgcggctgggaggagggcttcacggaggagggcgccagctacttcatcgaccataaccagcagaccacagcattcaggcatcctgtgacgggacagttttctccagaaaatagtgaattcattcttcaagaagagccgaatccacatatgtcgaagcaagacagaaaccaaagaccgtccagcatggtcagtgaaacatccacggctgggaccgcctccaccctggaggccaagcctggacccaagatcataaagtccagcagtaaagtccacagctttgggaagagagaccaggccattcggaggaaccccaatgttcccgtggtggtgaggggctggctgcacaagcaggacagttctgggatgaggctgtggaaaaggaggtggtttgtgcttgctgattactgcttattttactataaagacagccgagaagaagcggtcctcgggagcatccccttgcccagctacgtgatctctcctgtggcccctgaggatcgcataagccgcaaatattcctttaaggctgtgcacacggggatgcgagcgctcatctataacagctccacagcgggctctcaggccgagcagtcaggcatgaggacctactacttcagtgccgacacccaggaggacatgaacgcttgggtcagggccatgaaccaggctgcacaggtgctgtctcgatcgtcactgaagagggatatggagaaggtggagcggcaggctgtcccccaggccaaccacacagagtcctgtcacgaatgtggccgggtgggacccggacatacgagagattgtcctcatcgtggccatgatgacattgtcaacttcgagaggcaggagcaggagggagagcagtaccgttcccagagggacccactggagggcaagcgggaccggagcaaggccaggtctccgtactcgccagccgaggaggatgccttgtttatggatttacccactggcccaagaggccagcaggcacagccccaacgggcagagaagaatggaatgctgcctgcctcatatggcccaggagaacagaatgggactggtgggtaccagcgggcctttcctcccaggaccaaccctgaaaaacacagccaaaggaagagcaatctggcccaggtggagcactgggcaagggcccagaaaggggatagcaggagtcttcccttggaccagacgcttcctcgccagggtcctggccaatccctgtccttcccagaaaactaccagactcttcccaagagcacccgacacccctcggggggctcctcgccacctccccgaaacctgccaagtgactacaagtatgcgcaggaccgagccagccacctgaagatgtcgagtgaagagcgccgggcgcaccgggatggcaccgtgtggcagctctacgagtggcagcagcgccagcagttccggcacggcagccccacagcgcccatctgccttggctccccagagttcaccgaccagggccggagcaggagcatgctagaggtgccccgctccatctctgtgcctccatctccctcggacatccctcccccaggacccccaagggtcttcccaccccggcggccacacacaccagcagagcgagtcacagtgaagccaccggaccagaggaggagtgtggacatctcgctgggggattctccaaggagggcacggggccacgctgtcaagaactcatctcatgtggaccgacgttccatgccctccatgggttacatgacccacaccgtcagcgctcccagtttacatggaaaatcggctgatgatacctacctccagctgaagaaagacctggagtacctggatctaaagatgacaggccgggaccttctcaaggatcgaagtctgaagcctgtgaagatcgctgagagcgacactgacgtcaaactgagcatcttctgtgaacaagacagggtcctccaggacttggaagacaagatacgagcccttaaagagaacaaagaccagctagaatctgtgctggaggtgttgcacagacagatggagcagtaccgagaccagccccagcacttggagaagattgcctaccagcagaagttgctgcaggaggaccttgtccatatccgagctgagctctccagagagtccactgagatggaaaatgcttggaacgaatacctgaagttggagaatgatgtggaacagctgaagcagaccctgcaggagcaacacagaagagccttttttttccaggagaaatcgcagatacagaaagatctatggagaattgaagatgtcactgcaggcctgagtgcaaataaagagaacttcagaattctagtggagtcagtaaaaaatccggagagaaaaacggtgcctttgtttcctcacccgcctgtgccttcactctcaacttctgagagcaagccgcccccacagcccagtcctcccaccagccctgtgcggacccctctggaggttcgactcttcccccagctgcaaacctacgtgccgtaccgacctcacccaccccagctgaggaaagtgacatccccccttcagtcaccaactaaggcgaagcccaaagttgaagatgaagcacctcccaggcccccactccccgaactctacagcccagaggaccagcccccggctgtgccgcctctgccaagagaggccaccatcatccggcacacatctgtgcggggcctcaagcggcagtcagacgagaggaagcgagaccgggagctggggcagtgtgtgaatggggattccagggtggagccgcggtcgtatgtcagtgagcctgagctggcgaccctcagcggggacatggcccagccctccctaggacttgtgggccctgagagcaggtaccagacgctgccaggcagagggctctcagggtccacgtcaaggctccagcagtcgtccaccattgctccctacgtcacactccggaggggtctcaatgccgaaagcagcaaggcgaccttccctagacctaagagtgccttggagcgcctgtactcaggggatcaccagcgaggcaagatgagtgcagaggagcagctggagcgcatgaagcgacaccagaaggccctggtccgagagcgcaagaggacactgggccaaggggagaggacgggcctgccctcatctcgctacctcagccggccgctccctggagatcttggctcagtatgttaggaggggccaggcagcggggcagggacagggagccgagtgcccctcagagtcccccaaacacaagcacatcacacctcccagtgagagagctgtccattgacctacatggttcagagaacaccccacggggctgtttgtccacgacccaggctggacgaatgcctggtcagagggtgacctgaaccagagctggagtgaggatcaaacaggcccaggagcctgaggaaatacccagtcagtcctcccagccgcgatggagaggggcctttgcaggcgttcggaatctcggctgaattcaggacctgggaatacagggttcagagaggagaggaggaagatggtgacatgatttggttagaagcacaagcaaactgatcagcctcccagacctgccagcagatgctgtgtgagggtgatggagcacggggtcacacccctgccccaagggccactggtctccctgggcttgcagtgcagaggcctcagggtgtctgggattgctggggaggcctgtgctgccccctggtggcgcttcctggcgctgcgccctgtccacagtcaccttaggtccctttggaaacattccatttgacttttccctgttgtttgaaatcccatgtttccctaaacctctagcctgattgttctttccctaattcattgcacaagctcctttgcttttagtgttaccgctcattgcctctctaatcctgcctgattgtgtttacagaagcttctgatttgcactgaacatgctctaactggcctgtgctacttattaccgggcttgtaatagcggttcttgtctccatagcctgttgagtgttcccagatgtgactcacctttctgctgccctcttcatgcaggcctactgactcataattcacttgtcccaaaagccaccccacaagcctgagccaacctgctgcctgacgccacagtcattggcagaggtctgggcattattaatttataaaaatccatgctttacacctggacagtagacagggacttcagagattgcacgtttgaatacattctcccaagactgaggttgttcggttttaattcctgtagtccaatcacacaatttcttatggaaaaccttttgtgtttctggtatttaataacttgaagggatagcaaaatatactgtgtattcagagggcctctctgcagctgctagctcagacaccaaaggggtaaggcccaggacattcatatctttaaaagctgcaaacctggtaacctttaaacttttaaaacaaatgtcatatggggtaacactgaccttttataatttgatgtctcaaatgtagagattatctaaaaatcgtaacttgaataccttgtaatttttctcttaaaaaagaagacttgtgtaagtctctgcatcaacgccaataaacatgttgcttaataaaaaaaaaaaaaaaaaaaaaaaaaaaaaaaaaaaaaaaaaaaaaaaaa

SEQ ID NO: 28160 - DNA, 5492 bp, Homo Sapiens
ggacgtgcgcgcgctgccttcgcggcacctgggcctgaggtgcgtgcctcccgggccctcgccagctccagatgcgtgaggaggacttcagaaacccgactgagaagtggagcgacccccagggagggtcggacctgcctcaataccgccaaggtctttcatttcttgttcgcttactttcgtgaaatcctcacatcgttttaatggtactagtcaagacaagaaaatcaacaggctttcagccttgaggcaacattggatattattgagacatctgtggaatttaagaacagtatggagctcatcagagtatatcattgaagaatatgatggctgaaaacaatttaaaaatgctaaagattcaacagtgtgtggtagccaacaaactacctagaaacaggccatatgtttgcaatatttgttttaagcactttgaaacaccatcaaaattagctaggcactatctcattcatactggtcaaaagccatttgaatgtgatgtgtgtcataaaacctttagacaactagttcatctggagaggcatcaactaactcatagtctgccttttaaatgtagtatttgtcagcgtcactttaaaaatctgaagacatttgtgaagcaccaacaacttcacaatgaaacctatcagaataatgttaaacaggtcagaagattgctggaggccaagcaagaaaagtcaatgtatggagtgtataatacttttaccacagaggaaagatgggcattacacccgtgctctaagtctgatcccatgtatagcatgaaaagaagaaagaatattcatgcatgtacaatctgtggcaagatgtttccatcacagtcaaaacttgataggcatgtacttattcatactggtcagaggccttttaaatgtgtcttgtgtactaaatcttttcgacagtcaactcacttaaaaatccaccaacttacacattcagaagaaagaccttttcaatgttgtttttgtcaaaaaggatttaagattcaaagcaaacttctgaagcataaacaaatccatactaggaataaggcttttcgggctcttttattaaagaagaggcgtacagaatctcgccccctgcctaataagttaaatgcaaatcagggtggttttgaaaatggtgagattggtgaatctgaggagaataatccacttgatgtccactcaatttatattgtcccttttcaatgtccaaagtgtgaaaagtgttttgaatcagagcagattctcaatgaacacagctgttttgctgctagaagtggcaaaattccaagcaggttcaaaagaagctacaactataaaaccattgttaaaaaaatcttggccaagcttaagcgtgctaggagtaaaaaattagataactttcaatctgagaaaaaagtttttaaaaagagtttcttgagaaattgtgatcttatttctggtgagcagagctctgaacaaacccagagaacatttgtgggttctcttggcaaacatggaacatataaaacaattggcaatagaaagaagaaaacattgactttgccattttcttggcaaaatatgggaaaaaatttgaaaggcatccttacgacagaaaacatattaagcattgataattcagtgaataagaaagacttgtcaatctgtggttcatcaggtgaggaattctttaataactgtgaggtacttcagtgtggtttttcagttccaagggaaaacatacgtactagacataagatatgtccttgtgacaaatgtgagaaggtatttccttctatatccaaactaaaaagacactatttaattcatactggacagaggccctttggctgtaatatttgtgggaaatcttttagacagtcagctcacttaaaaagacatgaacagactcataatgaaaagagtccttatgcatctctttgccaagtagaatttggaaacttcaacaatctttctaatcattcaggtaataatgttaactataatgcttcccaacaatgtcaggctcctggtgttcaaaaatacgaggtctcagagtcagatcaaatgtcaggagttaaggcagagtcacaggattttattcctggtagcaccgggcaaccctgtcttcctaatgtacttttggaatcagagcaaagcaatcctttttgcagttattcagagcatcaggagaaaaatgatgtcttcctgtaccgatgcagtgtttgtgctaaaagtttccgatctccatctaaactggaaagacactacctaattcatgcagggcagaaaccatttgaatgctcagtttgtggcaaaacattcagacaggctcctcactggaagagacatcagcttactcactttaaagaacgaccacaagggaaagtggttgccttagattcggttatgtaaattgtcgcaaccactaacaattgtggtctctggtgatcttatttttaaagcctgtattatttaaaatgcatttttattgaaaggcctgcattaaactgaatggtttcacaggcatttgcttgtcctgcatagtaaggaggtagaatacatagaaaattaatacaatgttttagaaacagccaagttaattttagaggcaagaacatgatttgatgctataaagtaggcattttaatattgtaaacatatactttggctgtattgaaaaatataaatccatgatggctgtacaaataatttagcctcattcattttttaaaggaattattccttaagacatgccatctctttttagatatactcaaaagactgagaggcaaaacttggcttttagctgcagcacatagccctgttatatttgatttattttacatttcatatgaaagcataattttgtccacatgtgactcaaattgcattggtaattttttttttttttgtaagttaaaaaaactacagagacactaaaggtgaaaatggatgagacaattatagtattattttcattggtctttttttttgagatggagtctcactctttcgccaggctagagtgcagtggcgccatctaggctcactgcaacctccgcatcccagattccagcgattctcctgcctcagcctcctgagtagctgggattacaggtgcctgccatcacgcctggctaatttttgtatttttagtagagacgggggttcaccaagttggccaggatggtctcgatctcttgaccttgtgactcacccgcatcggcctcccaaagtgctgggattacaggcatgagccaccgcacccgacggtcttttcaaagctatttatttttaggactatgtggtaatttcaccttcaggtgataaggattttttttttctcccagctagtgctatctttctcaaaataatttaaaagtaggcgagaggctaggatgtacctatatttaccatgtttacttaccaggaatattttctaagtgccatagtctttttcataatacgtatgagttttaccttttcagaggaataatttcaagtcatttatttgctcattaatgatagcagtagtcatagacttaagactattctagagatcttcatctccataagacttttacatttattttagtaaacttttctttctatgcctctttaatggagtggttctgttatttaagcctgttctaagtttgatcaaatggcaatgactaggtctagttttagtttttatttttgcaggagtctattgctaaagaattttattttgatccttgttaaatttttattttaattaataaggtagtcattcctgtagagggataagatgcttgtagagttgtgggtatcattccaaatagaactgttatgatttgggaaatattctttactacaaaggacttatttcataattacagattttccttcatatttgcctttgtttataaaatcttcaggaatgacattctctagcaataaaaggaatgaaccgttatgtttctaagctgaaaagaggaacaggtgggtaattatcctgccatacttaaatatagtggaaaatcctctattgagaatgtggataaatgaacaattgtaagttttgcatcataaactgagaactttcttttgacaggggggaggcgggagggatagtaggtgggggtgatctgcttgcttcttttaccacaggtgatttttaagtaacttgggtttaatttacagagatgaaacatgacagtctgagtaaaatacccagtgatgtagaagtgtgcctgtttattatgtagatacagacatccagcaaaaacaggagaatcacatgctttaaagaacactttctcttaggtttccttgagatatgttcctccagtgcaagcaagataatggtttacagaatttgctttacacaaaacttgtcaagaactcatctgttaaaagcaaggaataactagtttatattttccaataatgttcaaggttttctccttaatatgtttgaaattattgattttggcatttttctaagcaatttatgtaattttatttgaagaaaatgttttgtataatgtttttcccagcctaaacagggagagtcctaacagtgttgtgcttgtatgattctgagactttatttgcgtaagtgatactactatactttatttttgacccatgcctttttaagctgtttcatattgaaaggtggaatattgtaaaaattttgtcaaagatgtactgtagtgctatttgaagtacctgtaacaaaacagttggccctctgtatccatgtactctgcatctgtggattaaaccaattgcagatcaaaaatattagaaaaaataaaaataatacaaataaaaatacagtataacagttatttaaatagcatttacattgcattaggtattagtctagggataaagtatacaggcggatgtgcgttggttatatacaaatatgtcattttatgtaagggacttgagtatacttggatttttggtatctgtgggttggggggacggtccaggaaccaataccccatggataccaagggacaactgtacttatttacctttattgtcattgcaagcttcttatggaaactttataggaatgaaaatatacatgttaagaagattaaacattagatagtagatggtttgttgcatgctagaactgttagtattgttgaatcaattactttggtttcatgaaaaaataaacgataaatatctttaaagagaactagaagaattttttgtttgagtgattccaggctgtagtatgatcatttactgaagtagtttgattggctggctaacttagaattattgtttcttgttttgtactgcaataggggttataattgtaagataaaaatgtgtgtgtgtttaagggaagtaggtggtggttaaaattcttggaaaattttcagaatactttaaaaataaagttccaagttacaaaaaaaaaaaaaaaaaaaaaaaaaaaaaaaaaaaaaaaaaaaaaaaaaaaaaaaaaaaaaaaaaaaaaaaaaaaaa

SEQ ID NO: 28161 - DNA, 5174 bp, Homo Sapiens
gagtgcgctttagctgctgcgccacgcgcgcctcgggcctgggcgcagaggatcggccgggcgcggcgggaaggaggctgcgggcagcgaggagcggctggcgctcgaggcggcggacggcaccatgtccccggggagcggggtgaagagcgagtacatgaagcgctaccaggagccgcgctgggaggagtacgggccgtgctacggcgagctgctgcactaccgcctaggccgccggctgctggagcaggcgcacgcgccctggctctgggacgactggggcccggccggctcctcggaggactcggcgtcgtcagagtcgtcgggcgccgggggccccgcaccccggtgcgccccgccctcgcccccgccgcccgtagagccggcgacccaggaggaggcggaacggcgggcgcgcggggccccggaggagcaggacgcggaggccggggacgcggaggccgaggacgcggaggacgcggctctgccagcactgccagtgaaagatgtagaagataaacctgaacaacaaaccagaacaagagagactgacaaatcacccaccagtactgagcctcgacagcaaccaagtgccttatttgctagaggaaacaggaaagcggtcaaaagtccccaaagatcatcgagtaaaataaaagaaaacaagcatccatttgctctttatggctggggagaaaaacagaccgatacaggaagccagaagactcacaacgtctgtgcgtccgctcctgtgcatgagattcatgaatcagcattacgagccaagaacagaagacaggtggaaaaaaggaaactggttgctcaaaggcagcgagctcactctgtggatgtggagaagaacagaaagatgaaggcttcctcctcagagaacccgtggatgacagaatacatgaggtgctattcggcaagagcttaaagaaacacttgcgtggacagcctcttttaaaaagtgtaaatgactgaaaggaaaaacaaaacaaaaaccatcaaaagaaacggacacaggtttaagaaaccaactgattatgcaaggttttttttagggaatttgtaaaagattgttttattttgatgaatattggtcacctacctcggcagtagggcagacagttgaagccatagacatttggttatttatgaagataattccctaaatctttgatattcttataaggtttttgttttaaagcatcttaatcttttaagatactgacaccaaatgcctttaaatggcaacagatgcttacagttcagtattcttttcataagcttaggtagagcctattatcatcttgttctaaataactttccagattccatagctataagatcattccatcctacagcataagactcgttttccttatatgccgttttgtttgtgaaagaatatcaagtcaaaaatgagtgtcagcactactactgattccatgtataatgaaagtagaactttgctagttcctgaaaatttttaacttatttgtatttcagttcagcagcatctttatgtagattgtgatatttaagaattatctgggctgggcgagggtctctttttctctttcagtgatcatctaggcagttattatttaatagtttaatagctcaagtacattccaatagacgaagtgcacacaacacaatatgtgtgtacagtagtagtaaagtttcttttgagtagtcaaagactcactttttttattgcctttttttttttttttaaagaatacatactgtggattcagtcccttgtcacacttgaccttttggcatacacccactgtggacttttgcctcttctgtaatggctggcaatgacatttcaaacttacaatctggaattgcacttggtacattggcattgcttgttccactgggatggggaccagtgtgaagatgcctgttagatagactgcccacccctactttctctttttctttatagcacttaacaataacaaagtcttgatgatgtacagtattcaaactttaggttgaaatacgttactctttgattcctagccagtagatcttatctacactttaatgggagagaatggtggtgtgtgagtaggcacaaatttatgtaaatagtgctccttctctttagtatgtttgctttgggggtagaaaaatggttttaacaaacactggtttccatcaaatgaatgatgtcttctccatcctgtggagacaagaatctgctagaaggatatgtgctaagttccttataagagataatggtgctctgcctatgccagcttggcacccgaagatgtgtgagtggacgtgaggctgagtattaccttagtatttttctctgggtctttgggaaaccatagtcaatttttagaacatattgctttcattccccataaactcttcacacatgataactgtttaagctttgaaaacacatactgaagtattgtgagcttaaaaaaactttttaaatatttgcatagttttgaggtgaatttgtttccttacagatctctcctaatcattgagatgtatatttcaaaagaggaaattttacatgttgtccaaaacagccttgctagtaactggtgaattttggtattaactattattaaagtctttaaacgacacaggtacctaaagatcaccttaatgtggcaatttgtgatggtgtagctagctgattgtgaaaactgttcctttaaagtcgcttcttgcatgttcggtgttagtcatccagctcaggcttgtgttgcagctgacaatctaggaaagacggccttagagagtggtgcaggccccacactgacggactgccttagaaacccgacttcctctagactttgaaccgccagacttttctcttgtttagaaaacaaacttatatttaatgtacttactacttaaaactccagacagagatataatgtagaaggcaaatattggccaattttttcctctttttaagtggaagacaaatgaacgggatttttaaagtgcttttaaagtgcatgaatggttaataaatcagtatgaattgtaagccttcatcttacatccaagtccttagttggttagggtttcttttctttcttttttaaagagtgtcaattaccttttgaacctgtgaaaatttgatagttgttaacagtctgatggtcctaattctttcttttcattctagaaatgaatgtggttgtaatcatgttcctaattcttgggacaacctgcaagacagtgagacagtttaaaaattacctttcatgttgaaaaagtctgaaacagagaacccaatgatatttaaaataaatgctacataaaactctttttaaaattttgattttaacttaattaaaacaatgtcataaatatgctttttgattttgttactgcttttaatattaaagtaatagaatattgaagcaatattgtctagcactctgctggacattaagtccgcgggaggagaagtgaacaggaatcgattctttgtcttttaactgcccttagttaggagatgttaaaatacttggcacctctggttatatgtatgttatgtgtgttctcccccctaaaatttctaagcacatttattcacttttaaaatgaatctttaaaagattatagttagtagttatagttaatattctatttacttggaaaaatgtgaataaatggatcttcaaaagattcattttaaaaatgaataaatgtataataggctataggtgatcttacttgcgtattaggtaggaggcacatatttataccatttcatatgtaatatctttgtcattgtgtttcatcgaagatcaattgctagcaacttgaagggtatttatacttgggtcacttgaactcagctgactaaattgtaagaacgagagcaagcaagatggctgttattggaagccataacttccagaagataattctgcacaattcgtaagttaaaaaaaatctgtagggtcttccactatcctttttcaggttgataatgctgttctgggcacacactttgtaaatggaatgttatggtacagtcgcctctcagtatccatggggcattggttccaggcctcccttaggatgccaaactccatggatactcaaaccccttctataaaatggtgtagtatttgcatatatcctagacacatcctcctgtatgctttaaatcatctctagattacttaaaatacctaatacaatgtaaatgctctgtaaatagttgttatactatattgtttagggaataatgacaaggaaaaaaaagcctgtacatgttcagcacaagtgaaaccatcctttttgcccccaaatattttcaatttgtatttggttgaatccatggatgcagaactcacggatacagagggccgactgtactttctttaaagtgttcaaaagtattactagcaaagaggaggaggagcaaagcatatatcagaagtaaaacaatttttcttgttgactgctttggtaaaaaacagtttgatggatagttttacatttcactggactagataaaaaatggtgctaatatttatgtagcttgatgctatagttgctttggtatcaaacttaatacctaacccatataagatccttattatataattttgtgatcagtaaaatgatattttaaagagtgatcttaaaaatatgacctggtcattgcacaacgtttgcatttgaaatgaatttttgtactatagggtggatatggagttattcagtgcaagtgtgtgcttaatatcaaaccctatgcaaggagctatgtctagatttttggtccaaatttgcctccttcaagcctactagtgtgagatggaaaaaaatcgattgctcttttaatattatttccattttgaaattctcgacacttgaatgaaggcagtagaggcctctttttggatttctcttctaataacaaaactttatttagggaaggtttccctgtgctatcgtaagtttgttttgagcactgcattcactttaaaattctggaggaacaaaggctgggcacataatcacaaagcccaggccacacaataattcggggttgtattttctaagaactatgtattgtttttagcttatagttaatattgtatttacttggaaaaatgtgaataaagttaattaacattacaaaaaaaaaaaaaaaa

SEQ ID NO: 28162 - DNA, 5045 bp, Homo Sapiens
agaggagtgggctggcggcggtagctgtcgcccgcttggttgcgtgaccgcggggtccgcgtccgctccctccacccttcgcccttcgcccttcgcctcgttccggcctccgcggcccagcaacggccgtcatggtgccgtcggcgctccctgcgcggccccgctgagcctcggtgcggcggcgagcgcggtcgagatcgccatgcctacccgagtatgctgctgctgttccgctttgcgtcctcgctacaaacgcctggtggacaacatattccctgaagatccaaaagatggccttgtgaaaactgatatggagaaattgacattttatgcagtatctgctccagagaaactggatcgaattggttcttacctggcagaaaggttgagcagggatgttgtcagacatcgttctgggtatgttttgattgctatggaggcactggaccaacttctcatggcttgccattctcaaagcattaagccatttgtagaaagctttcttcatatggtggcaaagctgctggaatcgggggaaccaaagcttcaagttcttggaacaaattcttttgtcaaatttgcaaatattgaagaagacacaccatcctatcacagacgttatgacttttttgtgtctcgattcagtgccatgtgccattcctgtcatagtgatccagaaatacgaacagagatacgaattgctggaattagaggtattcaaggtgtggttcgcaaaacagtcaacgatgaacttcgggccaccatttgggaacctcagcatatggataagattgttccatccctcctgtttaacatgcaaaagatagaagaagttgacagtcgcataggccctccttcttctccttctgcaactgacaaagaagagaatcctgctgtgctggctgaaaactgtttcagagaactgctgggtcgagcaacttttgggaatatgaataatgctgttagaccagtttttgcgcatttagatcatcacaaactgtgggatcccaatgaatttgcagttcactgctttaaaattataatgtattccattcaggctcagtattctcaccatgtgatccaggagattctaggacaccttgatgctcgtaaaaaagatgctccccgggttcgagcaggtattattcaggttctgttagaggctgttgccattgctgctaaaggttccataggtccgacagtgctggaagtcttcaatacccttttgaaacatctgcgtctcagcgttgaattcgaagcaaatgatttacaggggggatctgtaggcagtgtcgacttaaatacaagttccaaagacaatgatgagaagattgtgcagaatgctatcatccaaacaataggattttttggaagtaacctaccagattatcagaggtcagaaatcatgatgttcattatggggaaagtacctgtctttggaacatctacccatactttggatatcagtcaactaggggatttgggaaccaggagaattcagataatgttgctgagatctttgcttatggtgacctctggatataaagcgaagacgattgttactgcactgccagggtctttcctggatcctttgttatcaccatctctcatggaggactacgaactgagacagttggtcttggaagtaatgcataatctcatggatcgtcatgacaatagggcaaagcttcgagggatcagaataataccggatgtagctgacctaaagataaaaagagaaaaaatttgcagacaagacacaagtttcatgaaaaagaatgggcaacagctgtatcggcacatatatttgggttgtaaagaggaagacaacgttcagaaaaactatgaactactttatacttctcttgctcttataactattgaactggctaatgaagaagtagttattgatctcattcgactggccattgctttacaggacagtgcaattatcaatgaggataatttgccaatgttccatcgttgtggaatcatggcactggttgcagcatacctcaactttgtaagtcagatgatagctgtccctgcattttgccagcatgttagcaaggttattgaaattcgaactatggaagccccttattttctaccagagcatatcttcagagataagtgcatgcttccaaaatctttagagaagcatgaaaaagatttgtactttctgaccaacaagattgcagagtcgctaggtggaagtggatatagtgttgagagattgtcagttccgtatgtaccacaagtaacagatgaagatcgactttctagaagaaaaagcattgtggacaccgtatccattcaggtggatattttatccaacaatgttccttctgatgatgtggttagtaacactgaagaaatcacttttgaagcattgaagaaagcaattgataccagtggaatggaagaacaggaaaaggaaaagaggcgtcttgtgatagagaaatttcagaaagcaccttttgaagaaatagcagcacagtgtgaatccaaagcaaatttgcttcatgatagacttgcccaaatattggaactcaccatacgtcctcctcccagtccatcaggaacactgaccattacttctgggcatgcccaataccaatctgtcccagtctatgagatgaagtttccagatctgtgtgtgtactgatcggcgcatgaagacctcagcatatgatttgtaaagcctaaaaattaaggccaagctgagctttcagggtttacttaatgtgtattaacatacttcttgaaaataatgatggaacatatctttaaccaaatgtttggcataccatattagaagttttggagctatatataatttcgagtactttcaaagatagatttatgccatgttaatttgctttgaggttcctgttgcctttttaagttgaacatgttttggtttcactttattccactgttaagtagtatgttttaaacttttcacaaatgtaatgttttttaaaaagtaagccttcagaggattgaaactgtataaattgtttatctcttaaacatctacacagccgcttagatgtagaatttttgttgttgttttctgcaaaggcagatacatttaaatatattcctagtcctggggctgcaaaactgttcggtggctttttgtccccatgctttagataagctgggataggcaccttgctattcagttactataataatatgtgataggcattcctcatcttcttcacaataataggacatctgttgaatagcattcctcgaatataaccctaaaaacgccatactttaaattgtctggttcttgtaatattgtgtttcctgccaagagtttgaccattctgcttgagaagtgtagagcttactcttggagtaccaaactgtgcaatatttttacatcataagatgtattagtttacaggctgtgctttgaaattatagtagtattttgctgtggctccattaattaaatgagatatatatttagtgcagaaaaaagacatttaaaacagctattagttcacctgtgaagagtctgtacattttgatttctattaagagcacatttatttacatttgtatattattttaaatcctcatagtcaaaaaattctccagatggacttttaatttgtaagatttgaactgtgacttgtatacatctgtttagaatcaattatatttgaaaagctgcctgtgttttaacagtcaagtgtgctaaagtttgtcaatttaagctgcttttgatttcagctaccaagatcacaggtgcactctacacataacactgacagacccataacattacatacatcttagtgaattctatcacatggtaaaatgaacagctttctttgtaactcataaaattctcttaggacatttttataaagtcacctgtttatagttctatcttttcagattccatttctttttacataaaacagcatacatatcaaaaactgtagcctagaatacagtttaatttttggcttttgtttttgtttaaaaaattgcagtgaagaatgggatgtttgtgtttatggctatttgggcacctttagtagaaacagacaaaagtaaggaaacgataataggacaagcatacttgaaaatttctgaatacttaaacaaaagcgcaacatcttgaaaaccagtctagtcattgaaacctatgaaatgacactgaaagatcctgggctgcttcttaaataagtagatcagcaagacttgtttcagagtgacagtggagtcgttaccgctggaggactaaagggccctgtggcagctgtcactggaactttgcctcttgatcaggaaaaatgcttcaccagtccgtaaagccaagttgtattttttttattgcccttttttccttctgtatttttaaagaaggatgttaatttttgactatatattttaaaaaaatctaagcagggggacatgcaaaaacaatcatcatccacttggatgtcattttatagattaacactgtgtgcttttgtatggaaaaaatatatataatttaatagtataaaaaataaaatatatattcatttgcacttacgtgaaacacaaactttgctctacaaaatttcgtgtttcttagtgattttaaaatgcatgtattgcatgtaaaggaaaaccattacaattaatgtttatcacacctttatcttggtctttgttgatttgggttttgttggggtttttgttactgtttttaaattacagtaggcttctatatatcctggatttctgaactggtcttgttgacaaggattcccaagaaatggatcttttcactggctgactctcccatatctgcaagagattctgcaggaactgggtgtgcacacggtgttgtagccagttcaggtactgaatatttaggatttggtgaagttcactgtattgctatatttttgtagataaataaaactcaataaattgttaatcattctctttttgctgtaaaaaaaaaaaaaaaaaaaaaaaaaaaaaaaaaaaaaaaaaaaaaaaaaagaaaaaaaaaaaaaaaa

SEQ ID NO: 28163 - DNA, 2651 bp, Homo Sapiens
tggataacatggagtcgggcaagatggcgcctcccaagaacgctccgagagatgccttggtgatggcacagatcctgaaggatatgggaatcacagagtatgaaccaagggttataaatcaaatgttggaatttgctttccgttatgtgactacaattctggatgatgcaaaaatttattcgagccatgctaagaaacctaatgttgatgcagatgatgtgagactggcaatccagtgtcgtgctgaccaatcttttacctctcctcccccaagagattttttactggatatcgcaaggcagaaaaatcaaacccctttgccactgattaagccatatgcaggacctagactgccacctgatagatactgcttaacagctccaaactataggctgaagtccttaattaaaaagggacctaaccaagggagactagttccacgattaagtgttggtgctgttagtagcaaacctactactcctactatagcaaccccacaaacggtgtctgtcccaaataaagttgcaactccaatgtcagtgacaagccaaagatttacggtgcagattccaccttctcagtccacacctgtcaaaccagttcctgcaacaactgcagttcaaaatgttctgattaatccttcaatgattgggcccaaaaatattcttattaccaccaacatggtttcgtcacagaacacagccaatgaagcaaacccactgaagagaaaacatgaagatgatgatgacaatgatattatgtaaggaatatagtctagtctagatgcatttcaaaaggaaagttggttttgagcccagtatactgaactagaatattctagatcttgttttaccttaaaagactgaaatgtagctgcagtatttttcgtcagttaaaactgttagatctctttagtaaacatacaaatgtgtttttcagtaggcttcaattacaaacagttaagtacttgtttcttaatagtttcattaatgttgagtcctaatatggcaattctgtttttgagacacttttctgccttctatcactgatagtagcatttaagtttcagattctacagcctagtcagcagatttatctttgacagcataatttctgatctacatttaaatactactttattttataaggtaatatagttacttactgtcactagctaatttttttttttttaccaaatctctcaatataggaaacattttttggaaaggatggatttagaggagagattctaaatccattttggatgtatttgtttctttgacttccttaacttccaaactcaactccctttctagatcccattcattttctgcacctcccccataggcttgtttctctccattgctattaaatgtagaaggccatacctggaattttaaaaatattattcctggtaatacagctcagtgtcattttcctatttttaaaacatgctctacatgcctaatgttttgtgattcactttaacctgatggtttgcatttgctgtttttcactcttatgtcagagcagttgggttttaccccttagtttttatgcctgttaagctttactgtgcttttgacaggtagttttgggtcagttatattcagttttagtattgtattccaagttgataactcttccatgtttcacatttctaaatttaacagagatgctgtagcttaaaacatgttttgataagtaattacactggacctaggcaaaaccactgaagaacaagtgttcctttttaccacatacatattatgttttgatcactgctgcttgagccccgctattggtataattcagatcattttagcttgttgctgaggatgtcacatataagacaggatcaaacctgaaagacactaatggttcatcctctataaggccaacaaagaaaacaaattaatgtgatgtaacttgcatttatgtgcactctgcataggtttcccaataatactgtaatgttgctgaacacctttccctgttttccatttatacacatattaaagtcatattgggaaagatggcaaagcttttgagaatataaacacacctgttttgtttttcttaagttcaacatacttttgtagaatttgtaaaataaatgttcgtatcataattgagaatttatagccaaggatcctcaaaacagaagtttcatcttaggatagtgtttgatatatctaagaaagtccagtaacagagaagaaatgtctcaaatgtctcgtatcagttttagtgtttttcagtattagggaaaggtaatataaaaacaggtaaaatgtataaaaatagacctgatcaacatcataggagataaatattcattatatagcataggatattattacttgaatgttctcagggaggcagcaagtcagaaggcctaggttctagtcctagctccatcatttaccaactgtgtgaccttacttcacctcttagccttgttctcctcactagcagtaggaaagtaacacctaccctgcctacctcacagggctgttgtgagggttcaattggtatatgtgaaaattctttcagaattgtaaaatgctatatgactgtaaggaattattgcatttgttccaaggttaataaaaatttgagcttaaaaaaaaaaaaaaaaaaaaaaaaaa

SEQ ID NO: 28164 - DNA, 3439 bp, Homo Sapiens
gcgaacgaccaagagggtgttcgactgctagagccgagcgaagcgatgcctaaatcaaaggaacttgtttcttcaagctcttctggcagtgattctgacagtgaggttgacaaaaagttaaagaggaaaaagcaagttgctccagaaaaacctgtaaagaaacaaaagacaggtgagacttcgagagccctgtcatcttctaaacagagcagcagcagcagagatgataacatgtttcagattgggaaaatgaggtacgttagtgttcgcgattttaaaggcaaagtgctaattgatattagagaatattggatggatcctgaaggtgaaatgaaaccaggaagaaaaggtatttctttaaatccagaacaatggagccagctgaaggaacagatttctgacattgatgatgcagtaagaaaactgtaaaattcgagccatataaataaaacctgtactgttctagttgttttaatctgtctttttacattggcttttgttttctaaatgttctccaagctattgtatgtttggattgcagaagaatttgtaagatgaatacttttttttaatgtgcattattaaaaatattgagtgaagctaattgtcaactttattaaggattactttgtctgcccaccacctagtgtaaaataaaatcaagtaatacaatcttaactgttgtggccttttttgatcataagagttggtactgtttaaggccaaaagtaacagtttttatagatcttttagtttcaactcagcttttacaataaaaaggatttgtattgcattgagtttataaacttttggtttgtgaacttcatatttgatcttttctcttccaatcaaatgtctaggcttgtttgacttccacccccaatggtttttcactctttttatttacttcattttcctttaataacttaatctcttcatgttcagtttttacttcactctttattcttttctttgattatggtatgcttatttggaaagtcagtgaaactgtcaaaatgttatctcaataagatacttatatgagaactacaatcaccgaatctactgtattcaatattagcagatctaatttgataaacaacatggcttgtgtgaaaactgagcaggtgtttgtttacccatagtgttctgtgtagttattgcttagtctgcagaaaataatgacttagatgagatgtctgacttgctttcacttattaaacatgttcaccatgggatgatgtctgtaacatcagatattgttcaactagactaggatttaataaaaattgtgaaagcttactggcctaacattttattttataatattgggtatgaattatatgtagccagagatgtcattaagctttactgttatagtaggtaatatggttagtttgtagggaaaagagcatatgagcacatgcttgtgtattttggcctttgccccagtagaacagaccaatggcattctagacttgatgatactaagttttagcagacactagtaagtggtttgtatttaaccatactgatgaagcagacagattgaggcacagattttagtggctttgtggcaataaatagggcatggtgtgccttaggaaaagaatgtttataaagggaattataactgaaattaaaggaggcggcagtgaagaggaaataattctcttctatctaaatgatatacatatgatattttgagatttttataacagcagtggaacacaattctaggtagagtagaaaaaggaaagttttaaagacatataaaagattcttgttgacaaattatttttggtagcaaatctcaaatggttacctgctattaaggtctgccatattagagttttgcactattttgctaccaagtttgattcatacatctaaaacattttgtagttacttgtcaaggacttaatttgaaaatcatttgccaggccacatagttatcaatttttttttctatcagctattctgttgtatttctaaaacattttttagatgactttttaaagtatatttagcagtaaccttatgaggttcaaattggtaaatctcttgtaatttagccttcatcgaataataggtaccagtgtattaaaaatgtgtattttttgcagccccttgaaccagagtaggttcagagaaactcccaaagtttgtactttagacacatcaagcttgattggtaacttccctccttttttggggaacatgtttgtgtcctattaacttaattggatagatttttaaatatttcttatttttggcacacggaaagggtagttcgagtacagaactttgatttttggtgtagatgcagagggaatgatgggtaaatttcctaggtttatgtgaatttagggggtgtatgcattttgaaacaatctactaacagatggtgctgaaatctattacctacatgttttctagttgttcagcattatgttaatgaagcctccatataaggagtgtttctctggcacagttggtaagttgactgctaacttcatttaaatgtgttactggatatgcagtatactgaaattattaatcagtttgtgtataggaaaagagaactgggttaaaagcaaattaacttgttctgaaaagaaagtatagattaattttgttttctgtttaaattttatctccttggtaaagattttttttcctgggcagaaaacttggcatttttaggcgtagataccttaccttacaatgccaaaatgaatttaattccagtactcaggtttttccctttaacagactctatgtgtatcagggctttctaatgggtttttcctcttcgtttttaaaatgtgagtagcatttgaccaatttccagtgctcttagcattttacttaaagaacaaccactacaaaagaaaatctttgtaatttgattgtcttttgctttgcttcattaatgcctaagaacttaagaatactcctacctcattagctactcaagatgctgtgacgatcaaatctattctacataatgcgtttagaaacaaagacttgggtgaaaaatgaaataagtatattctgacttggctattgaggggaaaattcagtattaagtgttcctcacaggagatatgttagcagaatactataaaagtttgaaatttttaaaaagtaaaagtacttaaatttaggtatctctcctgaaattctttgcagttcattttttatggcagttaatccagtgaaacactcaaaagttttttttttttttaaaagtgtttttccagataaactgtagggtgaacattcacataatcacaaatatgtaattctgtaattgtggaatgcttgtatgctttgttttcgtacatcttccatggagatgtctgaatataatactccatctgtgaatattttaaatgttgaaataaaagtaagaaatgtgaaaaaaaaaaaaaaa

SEQ ID NO: 28165 - DNA, 1942 bp, Homo Sapiens
ggtgggtgtgtttcggcctggcctgggcaggcgcttgtgctgccagggcgccgggcccggggaggccggggtctcgggtggccgccggcccaggcgctggacggcagcaggatggggaaggcgaaggtccccgcctccaagcgcgccccgagcagccccgtggctaagccgggtcctgtcaagacgctcactcggaagaaaaacaagaagaaaaaaaggttttggaaaagcaaggcgcgggaagtaagcaagaagccagcaagcggccccggtgctgtggtgcgacctccaaaggcaccagaagacttttctcaaaactggaaggcgctgcaagagggaagacatctggtttgacgacgtggacccagcggatatcgaagctgccataggtccagaggcggccaagatagcgaggaaacagttgggtcagagcgagggcagcgtcagcctcagcctcgtgaaagagcaggccttcggcggcctgacaagagccttagccttggactgtgagatggtgggcgtgggccctaagggggaggagagcatggccgcccgtgtgtccatcgtgaaccagtatgggaagtgcgtttatgacaagtacgtcaaaccaaccgagcccgtgacggactataggacagcggtcagtgggattcggcctgagaacctcaagcagggagaagagcttgaagttgttcagaaggaagtggcagagatgctgaagggcagaattctagtggggcacgctctgcataatgacctaaaggtactatttcttgatcatccaaaaaagaagattcgggacacacagaaatataaacctttcaagagtcaagtaaagagtggaaggccgtctctgagactactttcagagaagatccttgggctccaggtccagcaggcggagcactgttcaattcaggatgcccaggcagcaatgaggctgtacgtcatggtgaagaaggagtgggagagcatggcccgagacaggcgccccctgctgactgctccagaccactgcagtgacgacgcctagcagtcctgccctgctgctgctgccgccccgctacagaggcaatgtgaccagtcacagggacagatcacatctccccagagtggcaactctggtgaaaccttttcagaatcatggcagaggggcgtggcgtggtgctactgagaaggtcctccttcctcttgactttgtggtctgaaacctggtcttactgtccatgtgtgtttgggcccggatggtcagggtggggagcagggacggccatgggcacgcctggccacgctttaccgactgctgaccccctgggccaggtgaggttggggcctgtgggccgccagtccatacggtgctgtcactgcccatcttcggtgacaccctggggtgaggtgctcagcaccttcctctcgaggagccacattttcctcctttgtgttaggggacataacaagctctgctgggcttgagggacccagaccaggtgtctgcagtcagctcctgagacacagctggccggcacaacaggtgttacatcaggggtttcctgtggccgtttgaactttgagcatttatctaaattaaattggcccagggttggctggtgggtcacccagcagaggcttctccccatagcacgaggatgtgttgcctgggcacggtgactgcggttattcctggaggtcggcagacatgccaaccttgggctatttgagctggagaagctatgtgatgctagccggtggctttctgggctaggccccagtttgaggctcccctgggaactagagccaggaacagccagtggcactgacaaggggacggagtccaaggcgttattgggccacctgacagctggacagaaaaggggcagacacaccgaggatgcgatttaaaataaatgcagatgtttacttggaaaaaaaaaaaaaaaaaaaa

SEQ ID NO: 28166 - DNA, 1021 bp, Homo Sapiens
ggggcgtccgcgcccgggagaggggttccccccgacagggccccgggccgccacgaagttagggaagcgctctctccagggtggaacctgggcccgcggctcccgggagaggagctgcccgcggaaggggtcggggtgggctccaggctgggagaaggatctgactttgctgacctcgcaggctggtaggggagctgccccccagagcagcatggatgccccgcgaagggacatggagttgctcagcaacagcctggctgcctacgcgcacatccgcgccaaccccgagagcttcggcctctacttcgtgctgggcgtctgcttcggcctgctgctcaccctctgcctgctcgtcatcagcatctcgtgggcgccccgcccgcggccccggggcccggctcagcgccgggacccccgcagcagcaccctggagcccgaggacgacgacgaggacgaggaggacacggtgactcggctgggccccgacgacacgctgccgggccccgagctgtccgcagagccggacgggcccctcaacgtcaacgtcttcacgtcggcggaggagctggagcgggcgcagcggctggaggagcgcgaacggatcctgcgggagatctggcgcaccgggcagccggacctgctgggcacaggcacgctggggcccagccccacggccacgggcaccctgggccgcatgcactattactgatgggccccggctcccgctgcaaggcgctcggggtaccggacctgcacatgagctcagagctaccccacaccttcggactgcctcggcccccacagctcccaggtgctactgggcgtggaccgccaccccctgagaggctcccttccccagtcctgccagaagaccccgggggcggggagggggcagcatgcagggtccccactccctctctggggtcgatgaagaggtgaagtgaccaaatgaaagaaagctgcattctcagtgaaaaaaaaaaaaaaaaaaaaaaaaaaaaaaaaaaaaaaaaaaaaaaaa

SEQ ID NO: 28167 - DNA, 1080 bp, Homo Sapiens
cgctgtccttgccgcccccgccatgggcctagagctgtttcttgacctggtgtcccagcccagccgcgccgtctacatcttcgccaagaagaatggcatccccttagagctgcgcaccgtggatttggtcaaagggcagcacaagagcaaggagttcttgcagatcaacagcctggggaaactgccgacgctcaaggatggtgatttcatcttgaccgaaagctcggccatcctgatttacctgagctgtaagtaccagacgccggaccactggtatccatctgacctgcaggctcgtgcccgtgttcatgagtacctgggctggcatgccgactgcatccgtggcacctttggtatacccctgtgggtccaggtgttggggcccctcattggggtccaggtgcccgaggagaaggtggaacgcaacaggactgccatggaccaggccctgcaatggctggaggacaagttcctgggggacaggcccttcctcgctggccagcaggtgacactggctgatctcatggccctggaggagctgatgcagccggtggctctcggctatgaactgtttgagggacggccacgactggcagcatggcgtggacgagtggaggctttcctgggtgctgagctatgccaggaggcccacagcatcatcttgagcatcctggaacaggcggccaagaaaaccctcccaacaccctcaccagaggcctatcaggctatgctgcttcgaatcgccaggatcccctgaagggtctgggatgggggccaggagattagcaacaaggattcattctgttacttacttgcccctttttatctttccctcttgccccagtcccttctctccagcttcatgtgaagctctgcacagacaagacactcagtgtccttggcagtgctgctactcctcaggtgcagcatacataaccagtaagagactaaatctgcaatatataaagagctcctacaaatcagtaacatgaagaacactcaaaaattggcaaatgtcatcagtgttttaaacagaataaagattccaaacactttgaatagagaaaaaaaaaaaaaaaa

SEQ ID NO: 28168 - DNA, 2041 bp, Homo Sapiens
ccccgtcactggggttttccttccgcataccccgggaaggcagggcgcccctgtccggcttcaggatccctgctgccttggtgatcccgggctgacagccagagagcacagcggctcagctcctggagagtgagggttgaagaaagcggagggcagccgcctgcgcccgctggctcccattaggtcggttcctgcagcggtgcccggcagccttggtgaaggccctgcccggcagagatcatgtattgcctccagtggctgctgcccgtcctcctcatccccaagcccctcaaccccgccctgtggttcagccactccatgttcatgggcttctacctgctcagcttcctcctggaacggaagccttgcacaatttgtgccttggttttcctggcagccctgttccttatctgctatagctgctggggaaactgtttcctgtaccactgctccgattccccgcttccagaatcggcgcatgatcccggcgttgtgggcacctaacggcctgccctgttagctttccaaggaagcagaagacgggaggggaggcattgacataggtcataaagcattggagtttcaaatcccgcagcctcgcgggtgtcacattcctgacggcgcctttttggcctgtgatgttttatccttacaatgtgaataatggcactgaccggtgcttttattgtaaagtcctatagtcgtgggtggtcttgtggttgtgtgtgttctgtccccatctaggtcctggctggccgcatgaccacccctctcgcctcattactgtgaggagtctgggtccatcctggtcagctgccccaatgtgacctggggcagataaaatgccagtctcattgtcacctctgtgacccctccttgtcagggtctccttccttcccagaatgttactgactcctcagtccctcttctggtttccctttatttctcttctacccttttccttttttggggagtacctgtccaagacagggctcatttttgcacttatctcgaatttgaagagattgctgacgcccgagagcctcgctttttcatccttctttccttgttcagcaggctagacagaaacatgtcttgactgttagttgtccacaaatcttcagtattttctccacttcatttttaagaaaggaagcaacagatagatgttgctctttcacctgggtgtctgggctcaagctttcccgcccagcctcacttcctttgcccttcctcctgcctttctcaactgtcccaaggagggggcctcattgtgtctcccgtgcatgctctgcagcattgaagtatggtgtgttcacgtagttctagcagtccccagctgagtgagtgggagagtacctgtgtgtttcgtaacggccttgatccccttgatagatgtttggatattttttggtgtgccctgtgtgtgtgtgtgtacaaatacatgtgtatattccttttaaagaagctttatcgaacgtggtctgattttgaggtttagcaatagctagctatatatggtaggtgccgctacagtttttatttagcatggggattgcagagtgaccagcacactggactccgaggtggttcagacaagacagaggggagcagtggccatcatcctcccgccaggagcttcttcgttcctgcgcatatagactgtacgttatgaagaatacccaggaagactttgtgactgtcacttgctgctttttctgcgcttcagtaacaagtgttggcaaacgagactttctcctggcccctgcctgctggagatcagcatgcctgtcctttcagtctgatccatccatctctctcttgcctgaggggaaagagagatgggccaggcagagaacagaactggaggcagtccatctagggaatgggactgtgaggccatacttgtgaaacgtctggactgctattctagagcttttatttggtgtgttcgttgcacagctgtttgaaatgtttaataaagctttataaactttaaaaaaaaaaaaaaaaaaaaaaaaaaaaaaaaaaaaaaaaaaaa

SEQ ID NO: 28169 - DNA, 2351 bp, Homo Sapiens
ggctgtgacagccacacgccccaaggcctccaagatgagctacacgttggactcgctgggcaacccgtccgcctaccggcgggtaaccgagacccgctcgagcttcagccgcgtcagcggctccccgtccagtggcttccgctcgcagtcgtggtcccgcggctcgcccagcaccgtgtcctcctcctataagcgcagcatgctcgccccgcgcctcgcttacagctcggccatgctcagctccgccgagagcagccttgacttcagccagtcctcgtccctgctcaacggcggctccggacccggcggcgactacaagctgtcccgctccaacgagaaggagcagctgcaggggctgaacgaccgctttgccggctacatagagaaggtgcactacctggagcagcagaataaggagattgaggcggagatccaggcgctgcggcagaagcaggcctcgcacgcccagctgggcgacgcgtacgaccaggagatccgcgagctgcgcgccaccctggagatggtgaaccacgaggaggctcaggtgcagctggactcggaccacctggaggaagacatccaccggctcaaggagcgctttgaggaggaggcgcggttgcgcgacgacactgaggcggccatccgcgcgctgcgcaaagacatcgaggaggcgtcgctggtcaaggtggagctggacaagaaggtgcagtcgctgcaggatgaggtggccttcctgcggagcaaccacgaggaggaggtggccgaccttctggcccagatccaggcatcgcacatcacggtggagcgcaaagactacctgaagacagacatctcgacggcgctgaaggaaatccgctcccagctcgaaagccactcagaccagaatatgcaccaggccgaagagtggttcaaatgccgctacgccaagctcaccgaggcggccgagcagaacaaggaggccatccgctccgccaaggaagagatcgccgagtaccggcgccagctgcagtccaagagcatcgagctagagtcggtgcgcggcaccaaggagtccctggagcggcagctcagcgacatcgaggagcgccacaaccacgacctcagcagctaccaggacaccatccagcagctggaaaatgagcttcggggcacaaagtgggaaatggctcgtcatttgcgcgaataccaggacctcctcaacgtcaagatggctctggatatagaaatcgctgcgtacagaaaactcctggagggtgaagagactagatttagcacatttgcaggaagcatcactgggccactgtatacacaccgacccccaatcacaatatccagtaagattcagaaaaccaaggtggaagctcccaagcttaaggtccaacacaaatttgtcgaggagatcatagaggaaaccaaagtggaggatgagaagtcagaaatggaagaggccctgacagccattacagaggaattggccgtttccatggaggaagagaagaaagaagcagcagaagaaaaggaagaggaacccgaagctgaagaagaagaagtagctgccaaaaagtctccagtgaaagcaactgcacctgaagttaaagaagaggaaggggaaaaggaggaagaagaaggccaggaagaagaggaggaagaagatgagggagctaagtcagaccaagccgaagagggaggatccgagaaggaaggctctagtgaaaaagaggaaggtgagcaggaagaaggagaaacagaagctgaagctgaaggagaggaagccgaagctaaagaggaaaagaaagtggaggaaaagagtgaggaagtggctaccaaggaggagctggtggcagatgccaaggtggaaaagccagaaaaagccaagtctcctgtgccaaaatcaccagtggaagagaaaggcaagtctcctgtgcccaagtcaccagtggaagagaaaggcaagtctcctgtgcccaagtcaccagtggaagagaaaggcaagtctcctgtgccgaaatcaccagtggaagagaaaggcaagtctcctgtgtcaaaatcaccagtggaagagaaagccaaatctcctgtgccaaaatcaccagtggaagaggcaaagtcaaaagcagaagtggggaaaggtgaacagaaagaggaagaagaaaaggaagtcaaggaagctcccaaggaagagaaggtagagaaaaaggaagagaaaccaaaggatgtgccagagaagaagaaagctgagtcccctgtaaaggaggaagctgtggcagaggtggtcaccatcaccaaatcggtaaaggtgcacttggagaaagagaccaaagaaaaaaaaaaaaaaaaaaaaaaaaaaaaaa

SEQ ID NO: 28170 - DNA, 3032 bp, Homo Sapiens
ccagggggaacgcaggtcgcttacccggctgggtaggtcggcggcctggttgccatggcagcggggtcgcgggccggcgccagggaaggccccgaggctgcgggcggccagggctgcccgcggattcccagacccggacgcccgagccagcaaccctgaggggcggccgggcagcgccgccaccatgttcctgggcaccggggagccggccttggacacgggagatgacagtctgtctgcagtcacctttgactctgatgtggagacgaaagcaaaaaggaaagctttccacaaacctccacccacatcgccaaagtcaccttatctctctaagccgagaaaagtggcctcctggaggtccctcaggacggcagggagcatgcctctgggcggccgagcgtccctgaccccgcagaagctgtggctgggaaccgcaaagccaggaagtctgacccaggccctgaactcacccctcacctgggagcatgcgtggactggcgtccccggcggcactcctgactgtctgacagacaccttcagagtgaagaggccacatctcaggcgctctgccagcaacggtcatgtccctgggactcctgtctacagagaaaaagaagatatgtatgacgagattattgagttaaagaagtcattgcacgtgcagaagagcgacgtggacctgatgagaacgaagctccggcgcctggaggaggaaaacagcaggaaggaccggcagatagagcagctcctggatcccagccgcggcacggattttgttcggactctggcagagaaaaggcccgatgccagttgggtcattaacgggctgaagcagaggatcctgaagctggaacagcagtgcaaggagaaggacggcaccatcaggaaactccagaccgatatgaagactaccaacctggaagagatgcggatcgccatggagacatactacgaggaggtgcatcgtctccagaccctcttggcaagttctgaaaccaccggaaagaagcccctgggggagaagaagacgggcgccaaaaggcagaagaagatgggcagtgccctcctgagcttgtcccggagtgtccaggagctcacggaagagaaccagagcctgaaggaggacctggaccgcgtgctgagcacctccccaaccatctccaagacacagggttatgtggagtggagcaagccccggctgctgaggcgcattgtggagctggagaagaaactaagtgtgatggagagctcaaaatcacacgccgcagagccagtcagatcacacccgccagcctgccttgcatccagctctgcgctgcacagacagccacgaggggaccgcaacaaggaccacgagcgtctccgaggggctgtgagagacctgaaggaagagcggaccgcgctgcaggagcagctactgcagagagatttggaggtgaagcagctcctgcaggcgaaggccgacctggagaaggagctggagtgcgcgagggagggcgaggaggagaggagagagcgagaggaggttttgagagaggagattcagacacttaccagcaagctccaagaattgcaagaaatgaagaaagaagagaaagaggattgcccggaagttcctcataaggcccaagagctcccagctcccactcccagcagcaggcactgcgagcaagactggccgccggattccagcgaggaggggctcccgcggccccgctccccctgctctgatgggagaagagacgccgcggccagagtcctgcaggcccagtggaaggtgtacaagcacaagaaaaaaaaggctgttctggatgaggcggctgtggtgcttcaggcagctttcaggggacatctcacgcggacaaagctcttagcaagcaaagcacatggctcagagccacccagcgtgccaggcctctcagaccagagctctcctgtgccccgcgttccgagccccatcgcccaggccacgggcagccctgtgcaggaggaggccatcgtcatcatccagtccgctctgcgggcacacctggcccgggccaggcacagtgctaccggtaaaagaaccaccaccgcagcttctaccaggaggagatcggcttcagccacacacggggacgcctcctccccacccttcctcgcagctcttcctgacccctctccctcagggccacaggccttggcacctctacctggggatgacgtcaactccgatgattccgacgatattgtcattgcaccgtctctgcccacgaagaactttccagtttaggtccccgtcactgtctccacgccgtgatggcagcgctgccgaggacataggaaccacgactggaaagataatttatcgtgttaggagaagaacgatgatacctacttaacacctcagcatctgcgtcgtgtctctttgtgcttttgtttgtggaaggagacccaaatgcctttactttattctctggggagggccagcggctcgcatccccctcatctccagctgcagctcggatggtggattttcagtgccaacagacacatctgccgtgaactcgcagatgccagggagccctgtagtgacacgttctctgacagcaccttgccgcctgcccacgaccttgaccgtgaggagctgctatccgcaaccagcgccgacaccatgccccctcttcctggtgacaccctcaacaaccaggatttgctcgatctcagcccagcaggccaggcagacacaccccgctgtgccttaggaaggtgtgagaccggcttcccccatccccacagcaaaacacggcctgtcccaagccagtgaggagctaaagacacccaggtccccaaatgatcttactccatgccccacccgctcacaccgtcctttcccgtcacccttgctatcccctggagcactgccctccagagctgcccttcccaggaaggaatttggttggattctgtcactgtggagaccaagattttttaaaattcccaattacaaaagcagcatcacacttgcttctgagaaaaaaaaaaaaaaaaaa

SEQ ID NO: 28171 - DNA, 1015 bp, Homo Sapiens
catcggcgattgtcctgtggcgttacagcaacgcggccgctgtgcactctgcccatagggagtacattgccttcagcctgcattagctgacaagtcagcagtttctactacagaaagcaaaaaaaaagtaagagaagaagtctgagaagtcaaaagacttgcagattatctgactaggacactctgtggaggactttgatacaaatggattgatttttcagtctagtgatctctgttcagctgccactgcagagccccgccatggaagacacgccgttggtgatatcgaagcagaagacggaggtggtgtgcggggtccccacccaggtggtgtgtacggccttcagcagtcacatcctggtggtggtgacccagtttgggaagatgggcaccctggtctccctggagcccagcagcgtggccagtgacgtcagcaagcctgtgctcaccacaaaagtccttctggggcaggatgagcctctcatccatgtctttgcaaagaacctggtagcgtttgtgtctcaagaagctggaaacagagcagtcctcctcgccgtggccgtgaaggacaaaagcatggaggggctgaaggcgctgagggaggtgatccgggtgtgccaggtgtggtgacctggaggcagccgccccgcgctgctcagcaggacacgtgaacacccagacacccactcagggactcaagtctcacctccctccccggtggagggaggaactttggcactagcccttggagccaggaaaaaagactcgtgtctcaggcagactcttactctggttactaagatcatctgtgcatgacggggagggtggaacaggtcccggaggagtcgtgaatggttctcaccaggacctgaatcgttgcttgtgtttgagaattggaggaatgagtcagcaggcgtggctcatggcccccccgtgtgcaggatcaattgtaggaggaaatttcttttttattaaaagcgaatgtgtatcccaaaaaaaaaaaaaaaaaaaaaaa

SEQ ID NO: 28172 - DNA, 988 bp, Homo Sapiens
gccccaagtgtctgactcgcaaaggccctggggctggaccccgacgaggctctgggcaccagagcaaaaccaacagagccactgggtcccccagtgtccggcgaatgaaagggggctctgccctgggcaccaaaacagcccaggccaaggtagctcgaacactggccaaagctgctcgtgcccaagccaaggtggctcgaacacaggccaaggctgctaaggcccgggccaaggccaaggcagcactggtcaaggctaaggccaaagctaaggcagcacaggtcaaggccaaggccaaagtcatggcagcacgggccaaggccaaggctaaagccaaggcagtacgggccaaggccaaggtggctcggacccagcccaggggcagaggcaggccaaagggatctgctaaggccagaactacaaggaagggccagaaaaaccgccctgagactgttgggcagaagaggaaaagggctgaggaggcaaaagatcttcctcccaagaagagaacacggcttgggccccgatctcctaaggcatggctagggcctggaacagcaaagctgctgaagttccgtgccataaaggtagataggcggtcctcggatgatgaggtgcggcagcgggctcagcggatcctccgcgtgaacctgtcacctgtaatacggctccagccattgctgccatattcagcagtctgattccttcacacggcaatgtttggggaaactaagcccagctgtctgtgtggctagtggcacagtgtgctatgtccgtggactccacaatcttgaggactcccggtgcctctctagggccctggtgaccaccagcctcctttcagaaaccagagtgggtggggtacggtggggtgggtgggcgggaggggtgttttcatggcgcgatgcactgtgacttgttattcaagttgtatgtctactgttccatctatcacgttttatacctttccaaaaaaaaaaaaaaaaaa

SEQ ID NO: 28173 - DNA, 1930 bp, Homo Sapiens
gctgcggtgttgctgttggagactcgattgttggtgacagcgaaagaacgataacaaaatgccggagcgagatagtgagccgttctccaaccctttggcccccgatggccacgatgtggatgatcctcactccttccaccaatcaaaactcaccaatgaagacttcaggaaacttctcatgacccccagggctgcacctacctctgcaccaccttctaagtcacgtcaccatgagatgccaagggagtacaatgaggatgaagacccagctgcacgaaggaggaaaaagaaaagttattatgccaagctacgccaacaagaaattgagagagagagagagctagcagagaagtaccgggatcgtgccaaggaacggagagatggagtgaacaaagattatgaagaaaccgagcttatcagcaccacagctaactatagggctgttggccccactgctgaggcggacaaatcagctgcagagaagagaagacagttgatccaggagtccaaattcttgggtggtgacatggaacacacccatttggtgaaaggcttggattttgctctgcttcaaaaggtacgagctgagattgccagcaaagagaaagaggaagaggaactgatggaaaagccccagaaagaaaccaagaaagatgaggatcctgaaaataaaattgaatttaaaacacgtctgggccgcaatgtttaccgaatgctttttaagagcaaagcatatgagcggaatgagttgttcctgccgggccgcatggcctatgtggtagacctggatgatgagtatgctgacacagatatccccaccactcttatccgcagcaaggctgattgccccaccatggaggcccagaccacactgaccacaaatgacattgtcattagcaagctgacccagatcctttcatacctgaggcagggaacccgtaacaagaagcttaagaagaaggataaagggaagctggaagagaagaaacctcctgaggctgacatgaatatttttgaagacattggggattacgtaccctccacaaccaagacacctcgggacaaggagcgggagagatatcgggaacgggagcgtgatcgggaaagagacagagaccgtgaccgagagcgagagcgagaacgagatcgggaacgagagcgagagcgggaccgagagagagaagaggaaaagaagagacacagctactttgagaagccaaaagtagatgatgagcccatggacgttgacaaaggacctgggtctaccaaggagttgatcaagtccatcaatgaaaagtttgctgggtctgctggctgggaaggcacagaatcgctgaagaagccagaagacaaaaagcagctgggagatttctttggcatgtccaacagttatgcagagtgctacccagccacgatggatgacatggctgtggatagtgatgaggaggtggattatagcaaaatggaccagggtaacaagaaggggcccttaggccgttgggactttgatacccaggaagaatacagcgagtatatgaacaacaaagaagctttgcccaaggctgcattccagtatggtatcaaaatgtctgaagggcggaaaaccaggcgcttcaaggaaaccaatgacaaagcagagcttgatcgccagtggaagaagattagtgcaatcattgagaagaggaagaagatggaagctgatggggttgaagtcaaaagaccaaaatactaatcactagttacaaccagagatgctccacaaggatatgctccccactgttttctttctacaatttccaaaggttgcaagatgtttttttgtggatgaatataaaattttattgtgtaattacttggttccattaaaattggttaacttgcaaaaaaaaaaaaaaaaaaaaaaaaaaaaaaaaaaaaaaaaaaaaaaaaa

SEQ ID NO: 28174 - DNA, 3203 bp, Homo Sapiens
ctctgctctcggcctcccgggctgcggggacgggacggctgccggcgcggactttgcgggccgggagccgagtccaggacagagccggaaccgccgagggaggcgagagggcagtgcgcggagatggcggccgcggcggcggaggaagggatggagccacgggcgctgcagtacgagcagaccctgatgtatggccggtacactcaggaccttggggcctttgccaaagaggaagctgctcggattcgcctgggagggcctgaaccctggaaaggtcccccttcctctcgggctgccccagagctcttggaatatggacggagccgttgcgcccgatgccgcgtctgttctgtccgctgccacaagttcctagtatccagggttggtgaagattggatcttcctggtcctgctggggcttctcatggcattggtcagctgggtcatggactatgccattgctgcctgtctgcaagcccagcagtggatgtcccggggcttgaacaccagcatcttgctccagtacctggcctgggtcacctaccctgttgtcctcatcactttctcagccggattcacacagatcctggcccctcaggctgtcggctctggcatccctgagatgaagaccatcttgcggggagtggtgctgaaagaatacctcacactcaagacctttatagctaaggtcattgggctgacctgcgccctaggcagcgggatgccgcttggcaaagagggcccttttgtgcatatcgcaagcatgtgtgctgcccttctcagcaagttcctctccctctttgggggtatctatgagaatgaatcccggaacacagagatgctggctgccgcctgtgccgtgggggtgggctgctgcttcgcggcacctattggaggcgtcctcttcagcatcgaggtcacctccaccttctttgcagtgcggaactactggcggggcttcttcgctgccaccttcagtgccttcatcttccgggtcttggcagtctggaaccgggatgaagagactattacagccctcttcaaaacccgattccggctcgacttcccctttgacctgcaggagctgccagcctttgctgtcattggtattgctagtggcttcggtggagccctctttgtctacctgaaccggaagattgtccaggtgatgcggaagcagaaaaccatcaatcgcttcctcatgaggaaacgcctgctcttcccggctctggtgaccctgctcatctccacgctgaccttcccccctggctttggacagttcatggctggacagctctcacagaaagagacgctggtcaccctgtttgacaatcggacgtgggtccgccagggcctggtggaggagctagaaccacccagcacctcacaggcctggaacccaccacgtgccaacgtcttcctcaccctggtcatcttcattctcatgaagttctggatgtctgcactggccaccaccatcccagttccctgtggggccttcatgcctgtctttgtcattgatggaattcatacggacagcagcacctaccggattgtgcctgggggctacgctgtggtcggggcagctgcgctggcaggagcggtgacacacacagtgtccacggctgtgatcgtgttcgagctcacaggccagattgcccacatcctgcctgtcatgatcgccgtcatcctggccaacgctgtcgcccagagtctgcagccctccctctatgacagcatcatccgaatcaagaaactgccctacctgcctgagctcggctggggccgccaccagcagtaccgggtgcgtgtggaggacatcatggtgcgggatgttccccatgtggccctcagctgcaccttccgggacctgcgtttggcactgcacaggaccaagggccgaatgctggccctagtggagtcccctgagtccatgattctgctgggctccatcgagcgttcacaggtggtggcattgttgggggcccagctgagcccagcccgccggcggcagcacatgcaggagcgcagagccacccagacctctccactatctgatcaggagggtccccctacccctgaggcttctgtctgcttccaggtgaacacagaagactcagccttcccagcagcccggggggagacccacaagcccctaaagcctgcactcaagagggggcccagtgtcaccaggaacctcggagagagtcccacagggagcgcagagtcggcaggcatcgccctccggagcctcttctgtggcagtccaccccctgaggctgcttcggagaagttggaatcctgtgagaagcgcaagctgaagcgtgtccgaatctccctggcaagtgacgcggacctggaaggcgagatgagccctgaagagattctggagtgggaggagcagcaactagatgaacctgtcaacttcagtgactgcaaaattgatcctgctcccttccagctggtggagcggacctctttgcacaagactcacactatcttctcactgctgggagtggaccatgcttatgtcaccagtattggcagactcattggaatcgttactctaaaggagctccggaaggccatcgagggctctgtcacagcacagggtgtgaaagtccggccgcccctcgccagcttccgagacagtgccaccagcagcagtgacacggagaccactgaggtgcatgcactctgggggccccactcccgtcatggcctcccccgggagggcagcccttccgacagcgacgacaaatgccaatgagcccctcgtgggtggcctaggatggtgctagccatgcccgtcagcccagaatgtgcatctttcattccttctgccttcggaaggcaggaggcagctacagctggaggctgcaccccagccccctccagacctggggtgccagcttctcccagttcatcctacctggaatctgacccactacccacctgcaacaagtcttccagaggcaggaagataggccctgccctggcaggatgggttggggtcacttgacccctgctccccctttgaggggaaaggggtggaactaagatgggtttataactggaacctccaatgaccagatgtatatagagatttacaaagatttttatattaatttaataaaacaaattcttaaatagaacaaaataaacacctaatgagccacttatatataaaaaaaaaaaaaaaaa

SEQ ID NO: 28175 - DNA, 3445 bp, Homo Sapiens
ctcagagccggggccgggccagagcggcgccccgctgccctgtccccgcgtgcagaccccgggcccggccccggccccccgccaagccatgctgtgcggccgctggaggcgttgccgccgcccgcccgaggagcccccggtggccgcccaggtcgcagcccaagtcgcggcgccggtcgctctcccgtccccgccgactccctccgatggcggcaccaagaggcccgggctgcgggcgctgaagaagatgggcctgacggaggacgaggacgtgcgcgccatgctgcggggctcccggctccgcaagatccgctcgcgcacgtggcacaaggagcggctgtaccggctgcaggaggacggcctgagcgtgtggttccagcggcgcatcccgcgtgcgccatcgcagcacatcttcttcgtgcagcacatcgaggcggtccgcgagggccaccagtccgagggcctgcggcgcttcgggggtgccttcgcgccagcgcgctgcctcaccatcgccttcaagggccgccgcaagaacctggacctggcggcgcccacggctgaggaagcgcagcgctgggtgcgcggtctgaccaagctccgcgcgcgcctggacgccatgagccagcgcgagcggctagaccactggatccactcctatctgcaccgggctgactccaaccaggacagcaagatgagcttcaaggagatcaagagcctgctgagaatggtcaacgtggacatgaacgacatgtacgcctacctcctcttcaaggagtgtgaccactccaacaacgaccgtctagagggggctgagatcgaggagttcctgcggcggctgctgaagcggccggagctggaggagatcttccatcagtactcgggcgaggaccgcgtgctgagtgcccctgagctgctggagttcctggaggaccagggcgaggagggcgccacactggcccgcgcccagcagctcattcagacctatgagctcaacgagacagccaagcagcatgagctgatgacactggatggcttcatgatgtacctgttgtcgccggagggggctgccttggacaacacccacacgtgtgtgttccaggacatgaaccagccccttgcccactacttcatctcttcctcccacaacacctatctgactgactcccagatcggggggcccagcagcaccgaggcctatgttagggcctttgcccagggatgccgctgcgtggagctggactgctgggaggggccaggaggggagcccgtcatctatcatggccataccctcacctccaagattctcttccgggacgtggtccaagccgtgcgcgaccatgccttcacgctgtccccttaccctgtcatcctatccctggagaaccactgcgggctggagcagcaggctgccatggcccgccacctctgcaccatcctgggggacatgctggtgacacaggcgctggactccccaaatcccgaggagctgccatccccagagcagctgaagggccgggtcctggtgaagggaaagaagctgcccgctgctcggagcgaggatggccgggctctgtcggatcgggaggaggaggaggaggatgacgaggaggaagaagaggaggtggaggctgcagcgcagaggcggctggccaagcagatctccccggagctgtcggccctggctgtgtactgccacgccacccgcctgcggaccctgcaccctgcccccaacgccccacaaccctgccaggtcagctccctcagcgagcgcaaagccaagaaactcattcgggaggcagggaacagctttgtcaggcacaatgcccgccagctgacccgcgtgtacccgctggggctgcggatgaactcagccaactacagtccccaggagatgtggaactcgggctgtcagctggtggccttgaacttccagacgccaggctacgagatggacctcaatgccgggcgcttcctagtcaatgggcagtgtggctacgtcctaaaacctgcctgcctgcggcaacctgactcgacctttgaccccgagtacccaggacctcccagaaccactctcagcatccaggtgctgactgcacagcagctgcccaagctgaatgccgagaagccacactccattgtggaccccctggtgcgcattgagatccatggggtgcccgcagactgtgcccggcaggagactgactacgtgctcaacaatggcttcaacccccgctgggggcagaccctgcagttccagctgcgggctccggagctggcactggtccggtttgtggtggaagattatgacgccacctcccccaatgactttgtgggccagtttacactgcctcttagcagcctaaagcaagggtaccgccacatacacctgctttccaaggacggggcctcactgtcaccagccacgctcttcatccaaatccgcatccagcgctcctgagggcccacctcactcgccttggggttctgcgagtgccagtccacatcccctgcagagccctctcctcctctggagtcaggtggtgggagtaccagccccccagcccacccacttggcccactcagcccattcaccaggcgctggtctcacctgggtgctgagggctgcctgggcccctcctgaagaacagaaaggtgttcatgtgacttcagtgagctccaaccctggggccctgagatggccccagctcctcttgtcctcagcccacccctcattgtgacttatgaggagcaagcctgttgctgccaggagacttggggagcaggacacttgtgggccctcagttcccctctgtcctcccgtgggccatcccagcctccttcccccagaggagcgcagtcactccacttggccccgaccccgagcttagcccctaagccctcctttaccccaggccttcctggactcctccctccagctccggaacctgagctccccttcccttctcaaagcaagaagggagcgctgaggcatgaagccctggggaaactggcagtaggttttggtttttattttttgagacagggtctcgctccgtcgcccaggctggagtgcaatgttgcaatcatggctcactgcagctttgaactcccaggctcaagcgatcctcccatctcagcctcctgagtagctgggactacaggcacaggccaccacacctggctaatgtttaaattttatgtagagatggcggggggggcgggggtctccctatgttgcccaggctggtctcgagctcctgacctcaagtgatcctcctgccccagcattccaaagtgctgggattacaggtgtgagccactgcctggcctggccgtaggtttgtaactgtttcatagaagagccctggagaagacagtagaatgagcctatctagtttaaaaaataaagaagcacgttgatttcaaaaaaaaaaaaaaaaaaaaa

SEQ ID NO: 28176 - DNA, 1700 bp, Homo Sapiens
cccgcgggcgtcactccggccatcgtccccacctccacctgggccgcccggcaggcaggcgacggaggcccgggagccatgggtgactggggcttcctggagaagttgctggaccaggtccaggagcactcgaccgtggtgggtaagatctggctgacggtgctcttcatcttccgcatcctcatcctgggcctggccggcgagtcagtgtggggtgacgagcaatcagatttcgagtgtaacacggcccagccaggctgcaccaacgtctgctatgaccaggccttccccatctcccacatccgctactgggtgctgcagttcctcttcgtcagcacacccaccctggtctacctgggccatgtcatttacctgtctcggcgagaagagcggctgcggcagaaggagggggagctgcgggcactgccggccaaggacccacaggtggagcgggcgctggcggccgtagagcgtcagatggccaagatctcggtggcagaagatggtcgcctgcgcatccgcggagcactgatgggcacctatgtcgccagtgtgctctgcaagagtgtgctagaggcaggcttcctctatggccagtggcgcctgtacggctggaccatggagcccgtgtttgtgtgccagcgagcaccctgcccctacctcgtggactgctttgtctctcgccccacggagaagaccatcttcatcatcttcatgttggtggttggactcatctccctggtgcttaacctgctggagttggtgcacctgctgtgtcgctgcctcagccgggggatgagggcacggcaaggccaagacgcacccccgacccagggcacctcctcagacccttacacggaccaggtcttcttctacctccccgtgggccaggggccctcatccccaccatgccccacctacaatgggctctcatccagtgagcagaactgggccaacctgaccacagaggagaggctggcgtcttccaggccccctctcttcctggacccaccccctcagaatggccaaaaacccccaagtcgtcccagcagctctgcttctaagaagcagtatgtataggggcctgtggcttatgtcacccaacagaggggtcctgagaagtctggctgcctgggatgccccctgccccctcctggaaggctctgcagagatgactgggctggggaagcaggtgcttgctggccatggagcctcattgcaagttgttcttgaacacctgaggccttcctggtgcccaccaggcactacggcttcctctccagaatgtggctttgcctgagcacagacagagtcagcatggaatgctcttggccaagggtactgggggccctctggccttttgcagctgatccagaggaacccagagccaacttaccccaacctcaccctatggaacagtcacctgtgcgcaggttgtcctcaaaccctctcctcacaggaaaaggcggattgaggctgctgggtcagccttgatcgcacagacagagcttgtgccggatttggccctgtcaaggggactggtgccttgttttcatcactccttcctagttctactgttcaagcttctgaaataaacaggacttgatcacaaaaaaaaaaaaaaaaaaaaaaaaaaaaaaaaaaaaaaaaaaaaaaaaaaaaaaaaaaaaaaaaaaaaaaaaaaaaaaaaaaaaaaaaaa

SEQ ID NO: 28177 - DNA, 1945 bp, Homo Sapiens
tggcgctgggcgggcggctgtgagcggcgctcggggcgcgctaggcggggagccgagccgggctggcggcaggcggacggggcgggcgcgtgcggcgcgagccgggcgctgaggacaagggccgctggtagggccggccggccggcgggcggagcgccgccgccgacgcacacgaggtgaccaggcattgatgcacccccaggaaggccacgggctcaggaggcccccccgccccgctggctgctgctcacatggtgtctgggcccttggcactctgttcatgcgggagatggcaggggctggcacatgacagtggagcagaaatttggcctgttttctgctgagataaaggaagcagaccccctggctgcctcggaagcaagtcaacccaaaccctgtccccccgaagtgaccccccactacatctggatcgacttcctggtgcagcggtttgagatcgccaagtactgcagctctgaccaagtggagatcttctccagcctgctgcagcgctccatgtccctgaacatcggtggggccaaggggagcatgaaccggcatgtggcggccatcgggccccgcttcaagctgctgaccctggggctgtccctcctgcatgccgatgtggttccaaatgcaaccatccgcaatgtgcttcgcgagaagatctactccactgcctttgactacttcagctgtcccccaaagtttcctactcaaggagagaagcggctgcgtgaagacataagcatcatgattaaattttggaccgccatgttctcagataagaagtacctgaccgccagccagcttgttcccccagctgacatcggcgacctccgggagcagttagtagaggagaacacaggctccttgtcgggcccagcgaaggacttttaccagcgggagtttgatttctttaacaagatcaccaacgtgtcggctgtcatcaagccctaccctaaaggcgaccagagaaagaaggcttgtctgtcggccctgtctgaagtgacggtgcagccaggctgctccctgcccagcaaccctgaagccattgtgctggacgtcgactacaagtctgggaccccgatgtagagtgctgcaaaagccccatatctggccaagttcaaggtgaagcgatgtggagttagtgaacttgaaaaagaaggtctgcggtgccgctcagactctgaggatgagtgcagcacgcaggaggccgacggccagaagatctcctggcaggcagccatcttcaaactgggagacgactgccggcaggacatgctggccctgcagatcatcgacctcttcaagaacatcttccagctggtcggcctggacctctttgtttttccctaccgcgtggtggccactgcccctgggtgcggggtgatcgagtgcatccccgactgcacctcccgggaccagctgggccgccagacagactttggcatgtacgactacttcacacgccagtacggggatgagtccactctggccttccagcaggtagccagggtggccacaggccggggaaagtcgtgtgcgctccaccctaccccagccacccatacccagcctctacccacaccctgctctcctcagtcatcctttgttaagggttaaaaccagggcacctgggctgggcacggtggctcacgcctgtaatcctagcactttgggaggccgaggcgggcagatcacgaggtcaagagatcaaaaccatcctggccaaaatggtgaacgctgtctctactaaaaatacaaaaattagctgggcatagtggcacgcgcctgcagtcccagctactcaggaagctgaggcaggagaatcgcttgaacccaggaggcagaggttgctgtgagccgagattgcaccactgcactccagcctgggcaacagagtgagactccatctgaaaaaaaaaaaaaaaaaaaaaaaaaa

SEQ ID NO: 28178 - DNA, 5764 bp, Homo Sapiens
ctgctcgttgagtgaagaaaatccaccggcatcgcctgagccccgctaccgagaagggcgccgcttcctccggggagggggataaagatcccccgccgccggcccatgaggatattgccgtgaaaggcacagcgactgcagcaggaaccggacccggcaccggagcggcggcggcggcggcagcagcggtaccgcctcctcacccggcggcggcagcagcggcggcggcggcggcggcggcggcggcggcggcagcggtcccccctcctcacccgaacatcagggccctccagactcaggcgccccaacaaattcctagaggacctgtgcaacaacctcttgaggatcgaatcttcactcccgctgtctcagcagtctacagcacggtaacacaagtggcaagacagccgggaacccctaccccatccccttattcagcacatgaaataaacaaggggcatccaaatcttgcggcaacgcccccgggacatgcatcgtcccctggactctctcaaaccccttatccctctggacagaatgcaggtccaaccacgctggtataccctcaaacccctcagacaatgaattcacaacctcaaacccgttctccgtttttccagaggcctcaaatacagcctcctagagctaccatcccgaacagcagtccttccattcgtcctggtgcacagacacccactgcagtgtaccaggctaatcagcacatcatgatggttaaccatctgcccatgccgtacccagtgccccaggggcctcagtactgtataccacagtaccgtcatagtggccctccttatgttgggcccccccaacaatatccagttcaaccaccggggccaggtcctttttatcctggaccaggacctggggacttccccaatgcttatggaacgcctttttacccaagtcagccggtgtatcagtcagcacctatcatagtgcctacgcagcaacagccgcctccagccaagagagagaaaaaaactataagaattcgggatccaaaccagggaggtaaagacataacagaggagattatgtctggaggtggcagcagaaatcctactccacccataggaagacccacgtccacacctactcctcctcagctgcccagccaggtccccgagcacagccctgtggtttatgggactgtggagagcgctcatcttgctgccagcacccctgtcactgcagctagcgaccagaagcaagaggagaagccaaaaccagatccagtgttaaagtctccttccccagtccttaggctagtcctcagtggagagaagaaagaacaagaaggccagacatctgaaactactgcaatagtatccatagcagagcttcctctgcctccatcacctaccactgtttcttctgttgctcgaagtacaattgcagcccccacctcttctgctcttagtagccaaccaatattcaccactgctatagatgacagatgtgaactctcatccccaagagaagacacaattcctatacccagcctcacatcttgcacagaaacatcagaccctttaccaacaaatgaaaatgatgatgatatatgcaagaaaccctgtagtgtagcacctaatgatattccactggtttctagtactaacctaattaatgaaataaatggagttagcgaaaaattatcagccacggagagcattgtggaaatagtaaaacaggaagtattgccattgactcttgaattggagattctcgaaaatcccccagaagaaatgaaactggagtgtatcccagctcccatcaccccttccacagttccttcctttcctccaactcctccaactcctccagcttctcctcctcacactccagtcattgttcctgctgctgccactactgttagttctccgagtgctgccatcacagtccagagagtcctagaggaggacgagagcataagaacttgccttagtgaagatgcaaaagagattcagaacaaaatagaggtagaagcagatgggcaaacagaagagattttggattctcaaaacttaaattcaagaaggagccctgtcccagctcaaatagctataactgtaccaaagacatggaagaaaccaaaagatcggacccgaaccactgaagagatgttagaggcagaattggagcttaaagctgaagaggagctttccattgacaaagtacttgaatctgaacaagataaaatgagccaggggtttcatcctgaaagagacccctctgacctaaaaaaagtgaaagctgtggaagaaaatggagaagaagctgagccagtacgtaatggtgctgagagtgtttctgagggtgaaggaatagatgctaattcaggctccacagatagttctggtgatggggttacatttccatttaaaccagaatcctggaagcctactgatactgaaggtaagaagcagtatgacagggagtttctgctggacttccagttcatgcctgcctgtatacaaaaaccagagggcctgcctcctatcagtgatgtggttcttgacaagatcaaccaacccaaattgccaatgcgaactctggatcctcgaattttgcctcgaggaccagactttacaccagcctttgctgattttggaaggcagacacctggtggaagaggcgtacctatttgcaaagtgcagagcaggcatggattgccaattctggaacagagcaaagccccaacttgccctccactggtgatgtcacacccacccatgaagagcctgcctctagggttgttgaatgttgggtcacgaagatctcaacctggccaaagaagagaacccagaaagatcatcacagtttctgtaaaagaagatgtacacctgaaaaaggcagaaaatgcctggaagccaagccaaaaacgagacagccaagccgatgatcccgaaaacattaaaacccaggagctttttagaaaagttcgaagtatcttaaataaattgacaccacagatgttcaatcaactgatgaagcaagtgtcaggacttactgttgacacagaggagcggctgaaaggagttattgacctggtctttgagaaggctattgatgaacccagtttctctgtggcttacgcaaacatgtgtcgatgtctagtaacgctgaaagtacccatggcagacaagcctggtaacacagtgaatttccggaagctgctactgaaccgttgccagaaggagtttgaaaaagataaagcagatgatgatgtctttgagaagaagcagaaagaacttgaggctgccagtgctccagaggagaggacaaggcttcatgatgaactggaagaagccaaggacaaagcccggcggagatccattggcaacatcaagtttattggagaactctttaaactcaaaatgctgactgaagccatcatgcatgactgtgtggtgaagctgctaaagaaccatgatgaagaatccctggagtgcctgtgtcgcctgctcaccaccattggcaaagacttggactttgaaaaagcaaagccacgtatggaccagtactttaatcagatggagaaaattgtgaaagaaagaaaaacctcatctaggattcggttcatgcttcaagatgttatagacctaaggctgtgcaattgggtatctcgaagagcagatcaagggcctaaaactatcgaacagattcacaaagaggctaaaatagaagaacaagaagagcaaaggaaggtccagcaactcatgaccaaagagaagagaagaccaggtgtccagagagtggacgaaggtgggtggaacactgtacaaggggccaagaacagtcgggtactggacccctcaaaattcctaaaaatcactaagcctacaattgatgaaaaaattcagctggtacctaaagcacagctaggcagctggggaaaaggcagcagtggtggagcaaaggcaagtgagactgatgccttacggtcaagtgcttccagtttaaacagattctctgccctgcaacctccagcaccctcagggtccacgccatccacgcctgtagagtttgattcccgaaggaccttaactagtcgtggaagtatgggcagggagaagaatgacaagccccttccatctgcaacagctcggccaaatactttcatgaggggtggcagcagtaaagacctgctagacaatcagtctcaagaagagcagcggagagagatgctggagaccgtgaagcagctcacaggaggtgtggatgtggagaggaacagcactgaggctgagcgaaataaaacaagggagtcagcaaaaccagaaatttcagcaatgtcagctcatgacaaggctgcattatcagaagaggaactggagaggaagtcgaaatctatcattgatgaatttctacacattaatgattttaaggaagccatgcagtgtgtggaagagctgaatgcccagggcctactacatgtttttgtgagagtgggagtggagtccaccctggaaaggagccagatcaccagggatcacatgggccaactactctatcagctggtacagtcagaaaaactcagcaaacaggactttttcaaaggtttttcagaaactttggaattggcagatgacatggccattgatattccccatatttggttgtaccttgctgaactggtgacccccatgttaaaagaaggtggaatctccatgagagaacttaccatagaatttagcaaacctttacttcctgttggaagagctggggtcttgctatctgaaatattgcacctactatgcaaacaaatgagccataagaaagtgggagccttatggagggaggctgacctcagctggaaggactttttaccagaaggagaagatgtacataattttcttttggagcagaagttggacttcatagagtctgacagtccctgttcctctgaagcactttcaaagaaagaactgtctgccgaagagctgtataagcgactcgagaaactcattattgaggacaaagcgaatgatgaacagatctttgactgggtagaggctaatctagacgaaatccagatgagttcacctacattccttagagctttaatgactgctgtttgtaaagcagctattatagccgactcttctaccttcagagtggacactgctgttatcaagcagagagtgccgatcttactcaagtacctagactcagatacagagaaggaactgcaagcactttatgcactacaagcatcgatagtaaaacttgatcaacctgccaatttgctgcggatgttttttgattgtctatatgacgaggaggtgatctccgaggatgccttctacaaatgggagagcagcaaggaccctgcagagcagaatgggaagggcgtggctctgaaatctgtcacggcattcttcacgtggctgcgggaagcagaagaggagtctgaggataactaaaacttcaaatacacaaaatgaaacaaaagaaacaatttaagtatttttttaaaaagtttcacgtcttcgccaatcacagtgcagcaaggccaattctcgcagaaacccccacgtgtgcacgagtgggagaggggaaagagaaaaaaaggtgatcatggaggaaaaaggtactggataaaagtaaacttcaaaccttagggcgggagcactaaaaccaaaatacatgtattatttatagaaaatattttctgttttaatcttttctttttaaacaaggactcatacttaaaaaaatgtttagcaaaaaaaaaaaaaaa

SEQ ID NO: 28179 - DNA, 1475 bp, Homo Sapiens
ctgtggcactgtggaggggcgcctagtaggcaggcgctctcagctctctccccggtacgtgacgagactccacggacgtcacgtgaggcaggcggcgagcgcgggtggggcggggttaggcggcgctccgcgagaaccaaagtgcagccgctgacccggcaaaactcagcgggggctggatagccatgcccaagtactgcagggcgccgaactgctccaacactgcgggccgcctgggtgcagacaaccgccctgtgagcttctacaagttcccactgaaggatggtccccggctgcaggcctggctgcagcacatgggctgtgagcactgggtgcccagctgccaccagcacttgtgcagcgagcacttcacaccctcctgcttccagtggcgctggggtgtgcgctacctgcggcctgatgcagtgccctccatcttctcccggggaccacctgccaagagtcagcggaggacccgaagcacccagaagccagtctcgccgccgcctcccctacagaagaatacacccctgccccagagccctgccatcccagtctctggcccagtgcgcctagtggtgctgggccccacatcggggagccccaagactgtggccaccatgctcctgacccccctggcccctgcgccaactcctgagcggtcacaacctgaagtccctgcccaacaggcccagaccgggctgggcccagtgctgggagcactgcaacgccgggtgcggaggctgcaacggtgccaggagcggcaccaggcgcagctgcaggccctggaacggctggcacagcagctacacggggagagcctgctggcacgggcacgccggggtctgcagcgcctgacaacagcccagacccttggacctgaggaatcccaaaccttcaccatcatctgtggagggcctgacatagccatggtccttgcccaggaccctgcacctgccacagtggatgccaagccggagctcctggacactcggatccccagtgcataaggatcaagacagacaatgtcgagggacaaaagatagaagatggaggaggaaagacattatacgtgggcttggcccagccccaccgcccacgcctgggtagtagcagtgcctccctcaagggcctgggttctaccaccccactcctagggatctcttgaaccttaggggtgacctgggcccaagtctctcatcagcccccaatcccctgggtaccaggcttctgccacccccggctcagatctttgcaaatcagtacgacagcctcagagcagagcaagggttgtttgggagaatcatacctggttctaaggagtcccacgctttttgccaagcctggtactgagttcatgataccatggtggacacagctgagaaaatccctgccctcatggtgctcattctacttgagtagacgatgaactagtaaacaaataaacaagaacactgcagaaaaaaaaaaaaaaa

SEQ ID NO: 28180 - DNA, 4901 bp, Homo Sapiens
gagccaggccatgtcggggctcctcaagaagagggccagtgggactgctggggtcgggctggaggggatctgattgggggaagcgtctggggactgcttggggcctgattgggggacgtcgcgaggatcggcttgccttgcgccatggactggcagccagacgagcagggcctgcagcaggtcctgcagctgctcaaagactcacagtcgcccaacacagccactcagcgcatcgtgcaggataaactcaaacaactcaatcagtttcctgacttcaacaactacctgattttcgtcctgaccagactcaagtcagaagatgagccaacgcgctctctcagtggcctcatcctcaagaacaacgtgaaggcacactatcagagcttcccaccccctgtggcagacttcatcaaacaggagtgtctcaacaacattggcgatgcctcctcgctcatccgagccaccattggcattctcatcaccaccatcgcttccaagggtgagctgcagatgtggcccgagctgctgccccagctctgcaacctgcttaactcggaggattacaacacttgtgagggagcctttggagccctgcagaagatctgtgaagactcatcagagcttctggacagtgacgccctcaacaggcccctcaacatcatgatccccaagttcctgcagttcttcaagcactgcagtcccaagatccggtcccacgccatcgcctgcgtgaaccagttcatcatggaccgggcccaggcgctgatggacaatattgacaccttcatcgagcacctatttgccctggctgtggatgatgaccccgaggtgcggaagaatgtgtgccgtgccctggtgatgcttctggaagtgcggattgacaggctcatcccccacatgcacagcatcatccagtacatgctgcagaggacccaggaccatgatgagaacgttgcccttgaggcctgtgagttctggctgacgctggccgagcagcccatctgcaaggaagtcctggcctcccatctggtccagttgatccccatcttggtgaatgggatgaagtactcggaaattgacatcatcctgctcaagggggatgtggaggaggatgaggctgtccccgacagtgagcaggacatcaagccacgcttccacaagtcacgcacggtcacactgccccacgaggctgagcggcctgatggctccgaggacgcggaggatgacgatgatgatgatgctctgtccgactggaatttgaggaagtgctcagcggctgcactggacgtcctcgccaatgtcttccgggaggaactgctgccccacctactcccactactcaaaggcctcctcttccaccccgagtgggtggtcaaggagtcgggcatcctggtgctgggcgccattgctgagggctgcatgcagggcatggtgccctacctgcctgagctgatcccgcacctgatccagtgcctgtcggataagaaggccttggtccgctccatcgcctgctggacgctgagccgctatgcccactgggtggtcagccagccacccgacatgcacctcaagcccctgatgacagagctgctcaaacgcatcctggatggcaacaagagggtacaggaggcggcctgcagtgcttttgccaccctggaggaagaggcctgcacggagctggtgccctacctcagctacatcctggacacccttgtctttgcctttgggaaataccagcacaagaacctgctcatcctctatgacgccattggcaccctggccgactctgtaggccaccacctcaaccagccggaatacatccagaagctgatgcccccactgatccagaagtggaatgagctcaaggacgaagacaaggacctcttccccctgctggagtgtctgtcatcggtggccaccgccctgcagagtggcttcctgccttactgtgagcccgtctaccagcgctgtgtcaccctggtgcagaagacactggctcaggccatgatgtacacccagcaccctgagcagtatgaggctcccgacaaggacttcatgatcgtagcactggatctgctcagcggcctggccgagggcctgggtggtcacgtggagcagctggtggcccgcagcaacatcatgacattgctgttccagtgcatgcaggactcgatgcctgaggtccggcagagctcctttgccctcctgggagacctcaccaaagcctgcttcatccatgtcaagccctgtatcgccgagttcatgcccattctgggcaccaacctgaacccagagttcatctccgtctgcaacaacgccacctgggccattggtgaaatctgcatgcagatgggggcagagatgcagccttatgtgcagatggtcctcaacaacctggtggaaatcattaaccgacccaacacacccaagacactgctggaaaacacagccatcaccatcggccgcttgggctacgtgtgcccccaggaggtggcacccatgctgcagcagttcatccggccttggtgcacgtccctcaggaacatcagggacaacgaggagaaggactcagccttccgcggcatctgcatgatgatcggtgtcaacccggggggcgttgtgcaggactttattttcttctgcgatgctgtagcctcctgggtgagcccgaaggatgaccttcgggacatgttttataagattctccacggcttcaaagaccaagttggggaagataactggcagcagttctctgagcaattcccgccgctgctcaaggagaggctggcggctttctatggggtctaggtgatcatggagactgccaggtttctgtctgcgtcgtcgtcggagggattactggggagtgcgctgcatccggaagtcgctgtgccctggttgaggggggttagggaggagtgagtgggactcaaatccagatgccttccccgtccgtccgtccgtccgtccatccgtccacttgccctcctggcaggtgggtggggccaccatgctcatcctacaaacggggaggtgggggggacttctggtgggcaagggcccctgggctctaatagggtcatctctggcagcccacttgggccagctacgtgggagggaggaattacacagctgaccgaatccggcttcggatgaggtgagggaggagcaggtcaggaggggggccctcgtagggacgcgtacactcacacggacacacatggccacacgcatgtgcgggtgccataaccggcgaggctgggccagccgctccaccatttccccgactgcatggagacagtagaattagtgaacccctgagttaacccgtaaggccttccgtgtaacctgcatctagagtttaagaagcttctgctgttttgccggaattggcggtgactggggagggctgggtgggtggggggcctcaggcgggatctcggggcggggggaggaggatggtgaccttgggagtcgccctgtcagcacgcacatgcttgggacccactccacacactccctgccagctttgttgcagcctcagctggtggtgtctccgtccttatcctagcctagctcgcagggtgagaaccactggagtggctggggctggccagaggtcaccgtttctccttcctgtgtgctccagtggcttttgaagacactgggttgggacctttttcctgaagagagctgggtgtagccagagctactggcacctaccccgagcatctctctctgtaagcagcttcaggggcagtccgtttctctgtgcttctgaaacccccttctcacgtttcaggccccagttttaactcaaggcctggggcaggggcgtttaattgatgatgacagaggacacaggtttttgccagcaaaaaggaaaaccaaggcttggtggaagggaaaggtggtgtgtcccctgttccctattccatctccctgggacttcctgctcatcatagtacccagtgagcccagagatcctactagactgggtcagcaattctagagaaccttccggaatagtctgggaacatggtcaaggtggaaggggctcccctagagagggtgggggtgtagttacttcccagttggccagaaaactgggccttgcagacccccttagcattttttccctttttttccttccctgctttctacttctttggggagccccttgtgttttggagtctgactggagtctcgcatcctggggcctgctccatccatccctcctgggcgccagaccctccatccaagccctgtgtctttccatagtcagggtcaggccctgcatctattccaaggggcactcagtacacattccataaattagctgggtgtccctgcacgcccaccccatgaaactcgagcaggtctctggaagccatttgttaaaaaaaaaaaaaaaagttttaaaaataccttttaattttctggtaattccagttctttgaagcatcctctgctgggtcttggggtgtgtggatggattggctgtctgatgggattggtaacccctcgctactcaagatggggggatacaaacaccttcagggaaggggagcctggttcttctcgttttccttttttttttttttttttaaaaaaaaactatttaattttttaatttatttttggttgttttttgcacaatgaagtttcagcttctcaaccttctcccctacccagggctgtggacccagactggccttgagccacagtccctctttccctcctcaccctcttccccctgcgggctcccgggtctgtccatttgttactgtgctgtgctggggattggcgccgaggtggcgtgagattccacttgtgtagaactttgttgagtaaagatcagtttcttgtgaaaaaaaaaaaaaaaaaaaaaaaaaaaaaaa

SEQ ID NO: 28181 - DNA, 4951 bp, Homo Sapiens
attcttccccacactgactcgccccaggcctcgaggtgagagagcctcctgaaatcaacttagttctttaccctcagggcctagctggtgaagaagtatacgtgcaagtggaactgagggttaaatgcccacctacatacccagatgtgtgatgatatttgaactggcacaccatgtgcagtcgtttctcagcgagcataacaagcccccaccaaagtctttccatgaagaaatgctggaaaggcaggctcaggagaagcagcagaggttgctggaggccaggcggaaggaggagcaggagcaacgtgaaatcctccacgagattcagagaaggaaagaggagatcaaggaagagaagaaaaggaaggaaatggctaagcaggaacgtttggaaatcactagcttgacaaaccaggactatgcctctaagagagacccagcagggcacagggcagctgccatcctccatggaggctctcctgactttgtaggaaatggtaaagcccggacatactcctcaggaaggtccaggcgagaacgtcagtattctgtgtgtagtggtgaaccctctcctggctcgtgtgacatcctccatttctctgtgggtagccctgatcagctcatggtgcacaaagggagatgtgttggcagtgatgagcagctgggaaaggtggtatacaatgctttggaaacagccacgggcagctttgtcttgctgcatgagtgggtccttcaatggcagaagatgggcccttgccttaccagtcaagagaaagagaagattgacaagtgcaaaaggcagattcaaggagcagaaacagaattcagctccctagtgaaactgagccatccaaatatcgtccgctactttgcgatgaactccagagaggaggaggactccattgtgatcgacattctggcagagcacgtcagtggcatctctctggctacacacctgagccactcgggcccagtccccgcccaccagctgcgcaagtacacagcccagctcctggcaggcctggattacctacacagcaactccgtggtgcacaaggttctgagcgcgtccagtgtcttggtagatgccgagggcactgtcaagataacagactacagcatctctaagcgtctggcagacatttgcaaggaggatgtatttgagcaagctcgagttcgttttagtgacagtgccctgccttataaaacaggaaagaaaggggatgtgtggcggctcggcctcctgctgttgtctctcagccaaggacaggagtgtggggagtatccggtgaccatccccagtgacctgccagctgacttccaagacttcctgaagaagtgtgtctgcctggacgacaaggaaagatggagccctcagcagctgctgaaacacagctttataaaccctcaaccaaagctgcctttggtggagcagagtcctgaagactctgggggacaagactacattgagaccgtcattcccagcaaccagctgcccagcgctgcgttcttcagtgagacacagaaacagttctcccggtacttcattgagtttgaagaactacaactcctagggaaaggagcttttggagctgtcatcaaggtgcaaaacaagcttgatggctgctgctatgctgtgaagcgcatccctatcaaccctgcaagcagacacttccgccggatcaagggcgaggtgacactgctatcgcgcctgcaccatgagaacattgtgcgctactacaacgcctggatcgagcggcatgagcgcccagcggtgccagggacaccgcccccagactgcacaccccaggcccaggacagcccagccacctgcgggaaaacatcaggcgacactgaagaactgggcagcgtggaggctgcagcaccgccacccatcctcagcagctcggtggagtggagcacatctgcagagcgttctaccagcacccgcttcccagtcacgggccaggattccagcagcgatgaggaggacgaggacgagcgcgatggcgtcttctcccagtcctttctacctgcttcagattctgacagtgacatcatctttgacaatgaagatgaaaacagtaaaagtcaaaatcaggatgaagactgcaatcaaaaggacggtagccatgagattgagccttcagtgacagctgaggctgtgcactacctttatatccagatggagtactgcgagaagagcacgctgcgggacaccattgaccaggggctgttccgagacaccagccggctctggaggcttttccgagagattctggatggattagcttatatccatgagaaaggaatgattcatcgcgacttgaagcctgtcaatattattttggattctgatgaccatgtgaaaataggtgactttggcctggcaacagaccatctggccttcactgctgaaggtaaacaggacgaccaggcaggtgacggagtgattaagtcagacccttcaggccatttgactggcatggttggtactgctctgtatgtaagccctgaggtccaaggaagcaccaagtctgcatacaaccagaaagtggatctcttcagcctgggaattatcttctttgagatgtcttatcacccgatggtgactgcctcagaaagaattttcgttctcaaccaacttcgagatcccacatcgcccaagtttccagacgacttcgatgatggagaacatacaaagcagaaatctgtcatctcctggctgttgaaccatgatccagctaaacggcccacggccatggaactgctcaagagtgagctgctccccccgccgcagatggaggagtccgagctgcatgaagtgctgcaccacacgctggccaacatagatgggaaggcctaccgcaccatgatgagtcagatcttctgccagcacatctcccccgctatagactacacctacgacagtgacatcctgaagggcaacttcttgattcgtacagccaagatccagcagcttgtatgtgaaaccatcgtccgcgtctttaaaaggcatggcgctgtccagctgtgcaccccactgctgcttccccgaaacaggcaaatatatgagcacaacgaagcggctttgttcatggatcacagcggcatgctggtgatgcttccgttcgacctgcgggtcccttttgcaagatatgtggcaagaaataacatactgaatttaaaacgatactgcatagagcgggtgttcagacctcggaagttagaccgatttcatcccaaagaactcctggaatgtgcatttgatatcgtcacttctaccaccaacagctctctgcccactgccgaaaccatctacaccatctatgaaataatccaggagtttcctgcacttcaggaaaggaattacagcatttacttgaaccatacgatgcttctgaaggcaatactcctacactgtgggatcccagaggacaagctcagccaagtctacgtcattctgtatgatgctgtgacagagaagctgactaggagagaagtggaagctaaattctgtaacctgtccttgtcttctaatagcctgtgtagactctacaagttcattgagcagaagggggatttgcaagacttaacgccaaccatcaactcactaataaaacagaaaacaggcgttgctcagttggtgaagtatagcttaaaagacctcgaggacgtcgtcgggctgctgaagaaacttggcgtgaagttacaggtctccatcaacctgggcttggtctacaaggtgcagcagcacactggcatcatcttccagttcctggcattcagcaaacgcaggcaaagggttgtgcctgagatccttgccgccggtggcagatacgacctgctgattcccaagttcagaggcccacagactgtggggccagtccccactgctgtcggtgtcagcatagccatagacaagatatttgctgctgtcctcaacatggaagagcctgttacagtgagctcctgtgacctcctggttgtcagtgttggccagatgtccatgtccagggccatcaacctaacccagaaactgtggacagcgggcatcactgcagaaatcatgtatgactggtcccagtcccaggaagagttacaagagtactgcagacaccatgaaatcacctatgtggctctggtctccgataaagaaggaagccatgtcaaggtcaagtcctttgagaaggagaggcaaacagaaaagcgtgtattggaatcggatcttgtggatcacgttatgcagaaactaagaaccaaagttggtgacgaaagaaatttcagagacgcttctgataatcttgccgtacaaactctgaaggggtcgttttctaatgcttcaggtttgtttgaaatccatggaactacagtagtccccaacgtgattgttctagcaccagaaaagctgtcagccagcaccaggaggcgacatgagattcaggtgcaaacccgacttcagactacacttgccaacttacatcagaaaagcagtgaaattgaaattttggctgtggacctacccaaggaaacaatcttacagtttctatcattagagtgggatgctgatgaacaggcatttaacacaactgtgaagcagctgctgtcacgcctgccaaagcaaagatacctcaaactcgtctgcgatgaaatttataacatcaaagttgaaaagaaggtgtcagtgctgttcctgtacagctacagagatgactactacagaatcctattttgaccctaaagaactgctgctgtattgttcaaatggacagggacttatactgaaataatggaatgttgtgcattcattttaactttaaattctaataagctgtcctacaaagctgagctttgtcgggttttcatgtataaatttacctttttgatataataaatgttttcatagaaaaaaaaaaaaaaaaaaaaaaaaaaaaaaaaaaaaaaaaaaaaa

SEQ ID NO: 28182 - DNA, 1580 bp, Homo Sapiens
tccccgtctttcttaccccctccctttctctctctctctctctctcactcgttccctaacattaaagagaaaatgctgctatccgtgacttccaggcccgggatttcgacttttggctacaatagaaacaacaagaagccatatgtgtcactggctcagcagatggcaccacctagcccaagcaacagtacacctaacagcagtagtggaagcaatggaaatgaccagctgagcaaaaccaacctatacatccgaggattgcaaccaggcactactgaccaagatcttgtcaagctgtgtcagccatatggcaagattgtttccactaaggccatactggacaagaccacaaacaaatgtaaaggctatggctttgtagattttgacagcccttcagcagcacagaaagctgtaacagcactgaaggccagcggtgtacaggcacagatggcaaagcaacaggaacaggaccccacaaatttatacatctcaaacctcccactgtcaatggatgagcaggaactggaggggatgctgaagccctttggccaggttatctccacccgtatccttcgagataccagtgggaccagcagaggtgttggctttgcaaggatggagtccacagagaagtgtgaagccatcatcacccactttaatggaaaatatattaagacaccccctggagtaccagccccatccgatcccttgctttgcaaatttgctgatggcgggccaaagaaacgacagaaccaaggaaaatttgtgcaaaatggacgggcttggccaaggaatgcagacatgggcgtcatggccttgacctatgaccccaccacagctcttcagaatgggttttacccagccccctataacatcacccccaacaggatgcttgctcagtctgcactctccccatacctttcctctcctgtgtcttcgtatcagagagtgactcagacatctcctctacaagtacctaacccatcctggatgcaccaccattcatacctcatgcagccttcaggttcagttctgacaccagggatggaccatcccatttctctccagcctgcctccatgatgggaccccttacccagcaactgggccatctctccctcagcagcacaggcacgtatatgccgacggctgcagctatgcaaggagcttacatctcccagtacacccctgtgccttcttccagtgtttcagtcgaggagagcagcggccaacagaaccaagtggcagtggacgcaccctcagagcatggggtctattctttccagttcaacaagtaacagtgggattcccctccccatctttactgaatagaaatgaattcttggagatactcatgctcccagattccagagggttaaccaggaatggagaccatccgtcggccctgctaaggactaacacttagccatcgtttttcacaggcctgggcctggaaaaagaaatctctacgttcctgccctttactattgctgatggagcctgggggaaccatcactttttttgtgtgctacattcaaggagatcaaaaaaacttttcttcttttgcaaaaaaaaaaaaaaa

SEQ ID NO: 28183 - DNA, 1707 bp, Homo Sapiens
cggatggatgttatgctatggttggccaggttcatggcggcttgatgggaattattcagagagctatggtcaaggcttgtcctcatgtctggtttgaacgctcagaaatgaaggatcgacacctggttactaagagactaaaagaacatattgctgataagaagaaactacccatactaatttttcctgaaggaacttgcatcaacaatacttcagtcatgatgtttaaaaaggggagctttgaaattggaggaaccatacatccagttgcaattaagtataaccctcagttcggtgatgcattttggaacagtagtaaatacaacatggtgagctacctgcttcgaatgatgaccagctgggccatcgtctgtgacgtgtggtacatgccccccatgaccagagaggaaggagaagatgcagtccagtttgctaacagggttaagtctgctattgctatacaaggaggcctgactgaacttccctgggatggaggactaaagagagcaaaggtgaaggacatctttaaggaagagcagcagaaaaattacagcaagatgattgtgggcaatggatctctcagctaagaggacggatgacagcctttagatctagaactagcccttagaaatggaatggctttttttgttttgttttgttttattgttttgtttttattattgttaatcttttctacagaatgattgtctctacctctttatgccagaggcagaacctacaggtgccctttttggcttttgttgttgttgtaacattagccccatggattgtaaggtggtttactgagttaaaacagattctgcttttgtaaaatgatggcatcactgtggactgaatgaaatatttgtatagaaaaaagtgcttgaaaagtgtgtttggaactcatcgatagggtaattctccaaaaatgcccaaactctttttctgtaattagccttgccactttcttcagtcacttaaatggtgagattacacatcagtgcaagatgaccattatggttatggtctactgcaaggttgaaaggaaaaatggaggattgtatttaggaaaagggacaactttgtggccacctgctctgaaagtcaaaaggaaatgtaaattagtgtcattagtgtgttggaagagaaatactattcagtaagcttcgccaaagaaaagtgagtcaaagttaatgtgtgtgcgcatttatatgtaggcagctcgtagaccacattttagccagcaactggtaacaaagagcttagttttccttgtttgaatgctgtagatctgtacctagtacccctcccatctactgatttgtttgtttttgtaaccaaacacattttcagatagaaggagccttaaaaaaaaaaaatcacattgagtaacttcagtatgaatgaatgagagtgtgtggagctacccctcaccctccacccctttgtgctttttattcccgaattttcccagtctcttaaacagaaaaatgactgatataattatcttttggaaactgagccttaattttttttagagggggaaataagttttccccaactcacacagcataagcaatgtttgacagcaatataatgccgttgtaaactactgagagtattgtatctgttctggtaaccatgtacagaatgtgaaactgtcttatgaatataaataaattctatatttctaaaaaaaaaaaaaaa

SEQ ID NO: 28184 - DNA, 1601 bp, Homo Sapiens
caagaaacgaaactcaaccgaaagcctgcagagagcagaacatggaaggagacttctcggtgtgcaggaactgtaaaagacatgtagtctctgccaacttcaccctccatgaggcttactgcctgcggttcctggtcctgtgtccggagtgtgaggagcctgtccccaaggaaaccatggaggagcactgcaagcttgagcaccagcaggttgggtgtacgatgtgtcagcagagcatgcagaagtcctcgctggagtttcataaggccaatgagtgccaggagcgccctgttgagtgtaagttctgcaaactggacatgcagctcagcaagctggagctccacgagtcctactgtggcagccggacagagctctgccaaggctgtggccagttcatcatgcaccgcatgctcgcccagcacagagatgtctgtcgcagtgaacaggcccagctcgggaaaggggaaagaatttcagctcctgaaagggaaatctactgtcattattgcaaccaaatgattccagaaaataagtatttccaccatatgggtaaatgttgtccagactcagagtttaagaaacactttcctgttggaaatccagaaattcttccttcatctcttccaagtcaagctgctgaaaatcaaacttccacgatggagaaagatgttcgtccaaagacaagaagtataaacagatttcctcttcattctgaaagttcatcaaagaaagcaccaagaagcaaaaacaaaaccttggatccacttttgatgtcagagcccaagcccaggaccagctcccctagaggagataaagcagcctatgacattctgaggagatgttctcagtgtggcatcctgcttcccctgccgatcctaaatcaacatcaggagaaatgccggtggttagcttcatcaaaaggaaaacaagtgagaaatttcagctagatttggaaaaggaaaggtactacaaattcaaaagatttcacttttaacactggcattcctgcctacttgctgtggtggtcttgtgaaaggtgatgggttttattcgttgggctttaaaagaaaaggtttggcagaactaaaaacaaaactcacgtatcatctcaatagatacagaaaaggcttttgataaaattcaacttgacttcatgttaaaaaccctcaacaaaccaggcgtcgaaggaacatacctcaaaataataagagccatctatgacaaaaccacagccaacatcatactgaatgagcaaaagctggagcattactcttgagaagtagaacaaggcacttcagtcctattcaacatagtactggaagtcctcgccacagcaatcaggcaagagaaagaaataaaaggcaaccaaaaagaaaggaagtcgaagtatctctgtttgcagacgatatgattctatatctagaaaaccccatgatcttggcccaaaagctcctagatctgataaacaacttcagctaactttcaggagacaaaatcaatatacaaaatatggtagcatttttatacaccaacgacatccaagctgagagccaaatcaagaatgcaatcctattcacaattgccacaaaaaaaaaaaaaaa

SEQ ID NO: 28185 - DNA, 2522 bp, Homo Sapiens
gcggggaacagcacccccaggatgcagtttgtgtcaacacggccgcagcctcagcagctgggcatccagggcctggggctggacagcgggagctggagctgggcccaggctctgcccccggaggaggtctgccaccaggagccggcgctgcgcggggaaatggccgagggaatgccgcccatgcaggctcaagaatgggacatggacgcccggcggccaatgccttttcagttcccaccctttccagatagggcacctgtcttccccgaccgcatgatgcgagagccccagttgcccacagcagagatctcactctggactgtggtggctgccattcaggctgtggagaggaaggtggatgcccaggccagccagctgctgaacctggaggggcgcacggggacagccgagaagaagctggccgactgtgaaaagacggccgtggaatttgggaaccacatggagagcaagtgggccgtgctggggaccctgctgcaggagtacgggctgctgcagaggcggctggagaacttggagaacttgctgcgcaacaggaacttctgggtcctgcggctgcccccgggcagcaagggggaggcccccaaggttccagtgacttttgtcgacattgctgtgtacttctccgaagacgagtggaagaacttggacgaatggcagaaggagctttataacaaccttgttaaggagaactacaaaaccctcatgtccctggacgcggagggctcagtccccaagccagatgctccagtccaggctgagcccagggaagaaccttgtgtgtgggagcagcgccaccccgaagagagagaaatcccaatggatcccgaagcaggagcagagcccctggtgcctgcgcaggatgcgtcctcccaggtgaagcgtgaggacaccctgtgtgtccggggtcagcggggcctggaggaaagagccatccctacggaatccattaccgactccccaatttctgcccaggacctcttgtcccggattaaacaggaggagcatcagtgcgtgtgggatcagcaggatttggcagacagagatattcccacggatcccaattcagagtctctcatctcagcacatgacattttgtcatggatcaagcaggaggagcagccatacccatggggaccacgcgactcaatggacggagagcttggattagactctggccctagtgacagcctgctgatggtgaagaacccacccccggccccgccacagccccagccccagccccagccaccgcagccgcagctgcagtcgcagccccagccccagagcctgccccccatcgcggtggccgagaacccgggcggccccccgagccgagggctgctggacgacggtttccaggtgctgcccggggagcgtggctccggcgaggcgccgccgggtggggaccgcagcaccgggggcggcgggggcgatgggggcggtgggggcggcggcgcggaggcggggacgggggcaggcggcggctgtggcagctgctgccctggcgggctgcggcggagcctcctcctgcacggcgcccgcagcaagccctactcgtgccccgagtgcggcaagagcttcggcgtgcgcaagagcctcatcatccaccaccgcagccacaccaaggagcggccctacgagtgcgctgagtgcgagaagagcttcaactgccactcgggcctcatccgccaccagatgacgcaccgcggcgagcggccctacaagtgctcggagtgcgagaagacctacagccgtaaggagcacctgcagaaccaccagcggctgcacacgggcgagcggcctttccaatgtgcactgtgcggcaagagcttcatccgcaagcagaacctgctcaagcaccagcgcatccacacgggcgagcgcccctacacgtgcggcgagtgcggcaagagcttccgctacaaggagtcgctcaaggaccacctgcgcgtgcacagcggcggcccgggccccggcgccccacggcagctcccgccgcctcctgagcgagactagggctgggctgggggagggcagggccggacggagtggatcgggggcggcctgagcaccaaccaccttgccgggtgtcctcagccaccgtctggaaatcggcaacaggcattgcactccggttgggggtcccccagggtggggcagggatcccccagatctgtctggtctgaatggacgcccagctcatctagggtggacccagctgctggggaagagccagggggaccgcgaggagccgagcgtcctcgggcaccgccctcacacctcctcgagtgccctgggaccactgggccacagatggtcatcaggggaagccaccagggagtcccgaagcccttctgagatcaggaaatcaggtcccaaggttaggagacgccctgaaaaaaagcgaaggccgagggatgtgctaagggtaacaccttcatgatgacaacactgcctcgcgtttcaatagcgctttatacttaaaaaaaaaaaaaaaaaaa

SEQ ID NO: 28186 - DNA, 1549 bp, Homo Sapiens
acagggagcattcacagggtcttgggaacaaaggcctgggcctccccgtttgaatttcagccccagttccagggcaagtcccagccacccaagcatacttaccagtactgcccaccaccacccactgcccacctctaagaagcccggctctcctactctgcttccaggctggggcctcacaggtggggctgttaccttcctcagggcttagggagggagggaggacatggacagggccttccaccctggctccttcacagggatggtagctgaccggtgatgggttcatttgtcaccttggactgtgagccacttccacttctcgccccccaggcaggagcaccctcactccaagggcttggcctggaaaggcaggctcacctgggactcaacgttccttcccccgccgccactgtgcccccccgtccctccaccccagaagccctgacctcatttgggcaccttgctgtcctctgggcttctcctctgcccaggtcaccctgtggcaggcctgggccctcaggatgtttcaaaggctccacagctccaccgctccacctggcttcactccagcaccctgtccctggagcacctctgtcctgtctgggccaacctggtctccctgccccatgccctcccctggctcttagcaacctgcccttttattcatgccatttggggtcacagatgcctagctggacacagctcccagaactggctccaccctggggccttgcccctagtaccccctggcaggagcaacccaccccatggtcgaggttcccctacccctggatcctggactgaagccatttcctacagagaagcgttcccaccccctctcaggcacaaaagccggtgtccagggactcaagacctgtacctggggttgcaggggctcctgccctgctgtatcccaccaggagggggccccactgcccttccggcccttaaaactgggctgggagtgaagacggggaagtgtgtgagacaaaacaaagccggcttgtttcctccccttggcaggctaagctctcccggcagcccgggctctggggcggaaggagaacagtgtcatctcttcctttgttgataaattgccaaagagtgggaacaggtggggtcaggggccagagtgcaggggagggggcaatggtggaggtggcggggggaagcagagggaggtgggctgaggcctcggtggggccagtgcgacgctggcttaaggagctggaggggttcctaatacacatttaattcagtttctcttccctaagaggctgccggagttggggcctcctccagcagagaccctcggacccctgcagggcctggacttggggtgaacagggcttcagtcagcgcaagtattccatttgcatttggtaatttttcatgccacctatttatgaatatataaatctttataccaaatctattttttaaaacatggaaaagttgcctttatggaaacttggcagagccagagtgtacacattcctaaaccattaaacagatttctataacaaaaaaaaaaaaaaaaaaaaaa

SEQ ID NO: 28187 - DNA, 3230 bp, Homo Sapiens
gcgaggcgtcccctcggcggccgcctcagtttccctggccgtaaaacgcgggcgatggcgctcgatgccccgggagacgccggggtccgcgggcccttccggcaccgggtcctccttcaggttcgggcacccggctgcctccacgcggggcgagcgcggcgatgggatcggtccgtgctgcgctcagccccgctttcgctatccctctgctccaggggcagcaaaatcagcagatgagcccccagcgcgcctgcggcccacacactgcggccgtaacagttaaacagacggggaacattcatgtgcgtagagctcttcacggggcgatacagaaatgtgtcgttctaaagcgttaacgacctgcaatttgcatatcctccaacacatggattttactgattcaattatggatgtgtgcaaagaatctgctgctcgctatatgggaacactttcagtttcccaagttaaaacatgaaattgcacatcatcatttggatccccaaagaggaaaagaaaaattcacaacctgccagtgaaatactcaggccacttggatgaagaccgaggtcctccatagaatccaggtgttatttactaactaatcagaaattaatatcaaaataggacttaaaaataacaaggctgtgttattacagcagtctttccagttgtgtacgctttactaatctaaattgggtaacagaactggagaaaaggaagactacacagacttatcataagctgttagtgaacgtgatagaaatgcgtaatttgttaaagtgaattacagctctgatttgtcaaatgaggaggtgaattatcctaggatttgctatgctgttgtggcgttagaagattggatctttagcagcaaaggtaacctcaacaatattttctgcttaagaaagtgccttggttaaggtagaccgtgatatcgtctttgactaagctctctgggctattgattctgtcatattccaaaggcagtattggtttgaagccgaatctcacggtcaatgtcaacatgcaatccacaaagaccctggcgcccttccacggtatgcactaaccaaaactttctcactgtgaaatcctttttttaaaaacaaaaaaacaaaaaacaaaaaccaaaaaaccttactgtgaatcctttcccaaggaatggtcccaccttcacctcggaaagaggcgtggcttgctctgtaagcaggtccaccctgaggagaccgctggtgcaagagccctgcttgcagaacacacagggggttttcccacattcttactggagtcagattcggcaaagcatttcaagcaactgctggacacttcaaataccactccctgttaacaacgccctgagtatctcactgtctccaggatctggtttaaagggaaacacagaaatggccaacagctccctccccaggcaggactgcgatttcacagacaacctataggcatccccagtctggtgaataaacaggagagtgagaggaaaacagcaatcattcaactccagtagatgtaaagcctccagaagaatgtgtcccgggaaggtcagaaatgtcatttttttcctccagcacatttcatctgccacattccgccgtcggatgtttgaggaaggagccccgcctttccttcaggggttcttgtcgccaagtttgatggtgacagttttcacttctgtgtattcggccaaagcgtattcacctctgtgatcacagaaaagaggaaaattcaaaatgggtacatcccttagccattgtgtagaaactgttctgaggcttcatcattccatcaggccgttggaggcttatgcaaaaggttaaaatgtgactacctcatggaataatagccaggactataacagcactagtaagtgtcagtagctgcatatgtgacttaaatgtaaatatcaaggtcttcttctgtgtgatgcttttgaaatggccaggactaagggtttccctttagagaatgaaggggattttaaaaaaagtaaagaggtgaattccctggggtggcaatagagagcaaaacgagagagcctggtggacggtggggtgtctgtgaacgagggaggggcagaaattacactgggttgataacttttagatggcaattgggagctgcttgaagaggagacagaagaggcagaggcccaaagctattggctggggatgtggccagaggaccagtgggaagaacaccaagggcctgaagctggcctcagagtgcacagctggggaccagctgtcaggcagtgaggccagcctagggggcatgagggaagcagacgttagcacagagtggacatggggaggccacagcttttgggttcacatccttggtatagttcctttctttaaatcttgcagggctcaggtgatccttccctggcaccatgggccgtcttcagggtagcttcccttccaagacccaagaggcagctttggagagatttaaatccttctaagcgcttgatctgctgtcaggtgaagaaaaatgtgtgcttgtttaggaagagatgaaggtagaggtggccactggagtctctgtagttaaaaagacctgtgacagaatcccatctcctcccttagatcaatggttctcaaagtgtggtccccagaccagcagcatcagcctcacctctgaacttgctagaaatgtagattctcaggcctcccccagccctactattgtaggcagaataaggatctccccaggtatccaaaattggatcccccaaacctgtgaatatgttgggctacagagtgaagaattaatgttgcagatggaattcaagttactaatcaattgactttaaaagagggagactctcctggatcatccaggcagacccagtgtaatcacaagggtccccaaaactggcagaagaagagaggcagagcaaaatgagattatagaaacaggttcagagagcagcagtgctggctttgaagatggaggatggggccaccagcctaggaatgcgagcagcctctagaggatggaaaaggcaaggaagtagattctctcctgagaacctccaaaaaggaatgaagcccttgattttagctcagggagacctgtgtcagatttttatcctacagaactataagataatagatttatgttatttaagccactgatgttatggtaacttcttgcaggagcaataaaagactaataaacttactgaatcagaaaaaaaaaaaaaaaaaaaa

SEQ ID NO: 28188 - DNA, 2006 bp, Homo Sapiens
gaacctcaggagggttgtggcacaatgaggaaggaaacgtgggtggaaaggcacgctggcctgctctgctggctgggccagtaactggggatggggctggggcagggcccactaagccactggtgactgggggaggggctggggaactgggtagcagacacaggctgaggatcggcacgggagcatggcagccaacgtctcgggtgccaagtcctgccctgccaacttcttggcagctgccgacgacaaactcagtgggttccagggggacttcctgtggcccatactggtggttgagttcctggtggccgtggccagcaatggcctggccctgtaccgcttcagcatccggaagcagcgcccatggcaccccgccgtggtcttctctgtccagctggcagtcagcgacctgctctgcgctctgacgctgcccccgctggccgcctacctctatccccccaagcactggcgctatggggaggccgcgtgccgcctggagcgcttcctcttcacctgcaacctgctgggcagcgtcatcttcatcacctgcatcagcctcaaccgctacctgggcatcgtgcaccccttcttcgcccgaagccacctgcgacccaagcacgcctgggccgtgagcgctgccggctgggtcctggccgccctgctggccatgcccacactcagcttctcccacctgaagaggccgcagcagggggcgggcaactgcagcgtggccaggcccgaggcctgcatcaagtgtctggggacagcagaccacgggctggcggcctacagagcgtatagcctggtgctggcggggttgggctgcggcctgccgctgctgctcacgctggcagcctacggcgccctcgggcgggccgtgctacgcagcccaggcatgactgtggccgagaagctgcgtgtggcagcgttggtggccagtggtgtggccctctacgccagctcctatgtgccctaccacatcatgcgggtgctcaacgtggatgctcggcggcgctggagcacccgctgcccgagctttgcagacatagcccaggccacagcagccctggagctggggccctacgtgggctaccaggtgatgcggggcctcatgcccctggccttctgtgtccaccctctactctacatggccgcagtgcccagcctgggctgctgctgccgacactgccccggctacagggacagctggaacccagaggacgccaagagcactggccaagccctgcccctcaatgccacagccgcccctaaaccgtcagagccccagtcccgtgagctgagccaatgatgtggcctagcggaagctgcctcctcaccctaggtgttgctggagaaccctgagggcagggcccgagccccgacacatcccttcccccaaaaagcaacacctgtgcttgcagccaggtcaggcccagctgcagcccaggcaggagcagtcgcctttcccacccacagcgctggccacagggctccctgcagggtcagggaccagaccacgcccagaggaggggaggcactggcccccgccacaggactggagacgcaagaacaaaaagaaccaagtagagagagtggagctgctttattgcccttggagcccgcgctctcggaggctgtcttctgtcgccaagggtcccggaccgagtacacggtggcagctggcttagttggtggacggcctggggtaggggagggtggcaggtataagacttctgggggcaccccaagaccccagacacccaagtggcatcttgggggtgggtgggcagaggacggggtaatgtgaggacgaagcgggcacggagccagatggccagtctccaggcctggtccacggactggcagggaccccaggcacaagagctgccacccctctgcccggttttggaaaaaaacaataaaggactgtcccctcaaaaaaaaaaaaaaaaaaaaaaaaaaaaaaaaaaaaaaaaaaaaaaaaaaaaaaaaaaaaaaaaaaaaaa

SEQ ID NO: 28189 - DNA, 3793 bp, Homo Sapiens
gggtggcaagatggtggcgcgcaggaggaagtgcgccgcgcgggacccggaggaccgtatccccagcccactgggctacgcagctattccaatcaagttctctgaaaagcaacaggcttctcactacctctatgtgagagcacacggcgttcgacaaggcaccaagtccacctggcctcagaagaggactctttttgtcctcaatgtgcccccatactgcacagaggagagcctgtcccgcctcctgtccacctgtggcctcgtccagtctgtagagttgcaggagaagccggacctggctgagagcccaaaggagtcaaggtcgaagttttttcatcccaagccagttccgggtttccaggtagcctatgtggtgttccagaagccaagtggggtgtcagcggccttggccctgaagggccccctgctggtgtccacagagagccaccctgtgaagagtggcattcacaagtggatcagtgactacgcagactctgtgcccgaccctgaggccctgagggtggaagtggacacgttcatggaggcatatgaccagaagatcgctgaggaagaagctaaggccaaggaggaggagggggtccctgacgaggagggctgggtgaaggtgacccgccggggccggcggcctgtgctcccccggactgaggcagccagcttgcgggtgctggagagggagagacggaagcgcagccgaaaagagctgctcaacttctacgcctggcagcatcgagagagcaagatggagcatctagcgcagctgcgcaagaagttcgaggaggacaagcagaggatcgagctgctgcgggcccagcgcaaattccgaccgtactgagctgtgagagccgcagtgaatggctggaggtgcagggccaggaggaggcgaggcagggcctgcagcggtctctgagaggccgagctctggccaacgggccccaggttgaaggccaccgcgtccaacagccccatcagagtccacacaggccaggagggaaggaccaggccacccctcgggtcttgtgcttcagcagtcctggggacccaggcgtgccgagaggaggacttgtccttcctgcttcttgcctccacaccctcctctccaggaccctggatgaatccgttctgtgcttccttttccctcaatgcaaaagcccttgctggcaacgaaaaagcctcaaaagcagtgagaatacaagaaccttttattttccatccagttgggcagcagggaaaggctaggtgggcccagcccgcccttccttcctccagctggctggagattattagccaggagacagcagccctggaacccagactctgtctcccccttgaggtcacagatgttgaagttggaatctcgctccttcccctgactaccatcctaggctgggcctcaagactagtgaggcctgtccccaccatccctggccttgttgtggggctcaggaactcagagtcccagtgttgagtctgggagcactaggtcttcatagttccaggcccagagctacagctgggctgggagcgtgtgtgtgcactgtaagaaggagctgatgatactggccacgtgctggggttcgctcatgtggacacagtgattgcctgggacttccacaaactggaaccgctggagaggggagggggtgggtagtgagatgtggccagaggagcctagggagctccatgggccccggggtcagggccctcccacagcattccagctccctgcaggtcaggagcgcctcccacagtgagtttcccccacactcggctccttggagccccgacagtccatagcaccccaggagatgtctaaccttagggacttggaggcctcccaggggtctaggccagctgagttgtgaagttgcatggcagggacagggcagggccgaggccagggttgctgtgattgtatccgaagtagtcctcgtgagaaaagataatgagatgacgtgagcagcctgcagacttgtgtctgccttcaagaagccagacaggaaggccctgcctgccttggctctgacctggcggccagccagccagccacaggtgggcttcttccttttgtggtgacaacgccaagaaaactgcagaggccccagggtcaggtgtaagtgggtaggtgaccataaaacaccaggtgctcccaggaacccgggcaaaggccatccccacctacagccagcatgcccactggcgtgatgggtgcagagggatgaggcagccaggtgttctgctgtggtttgggagcctataaagtgagactaggctgggcatggtggctcccatctgcaaaaccagcactttgggaggccaaggtgggcggatcgcctgaggtcaggagtttgagaccagcctggccaacatggtgaacccccatctcttaaaaatataaaaattagctgggcatggtggcaggtgcctgtaatcccagctactcaggaggctgaggcacgagagtcgcttgaacccgggaggtggaggttacagtaagctgagatcttcccactgcactccagcctgagcgacagagtgagactccatctcaaaaaaaaaaaaagtgtgactattagctgggcatgatggcatgcgcctgtagtgccacctactcaggtggctgaggtgggaggatcatttgagcccaggagtttgaggctgcagtgagctatgactgagcctgagcaacagaatgagaccctgtctctcaaaaaatgtgggactgtctctggcagttgggtcacctaattgtgcctggccccaagaaggaggggtgggtacttgaggatggtaaagaacctccccaccaaaggtctctgtttcttaaattctgattacatgtgtccccaggcctctagggactgatcactggagcatgaggcctgatagatcctggtggtcacttgttgggcctgggggcagaccaggggtctttcccagtgcatgagaagagatgggtgaggtgggaccagagtgggcgacagtggctggacaccagctgcctgagccccgccttacctctttgagggtggatttcattgtgtctatcatgaacgacagggactccttgtcagagtaattctctcttggatcaaaatatccgtggactgctctggaaagtgaggagttgggggttgttggggttcatcttagaaccgcctcccagcggtgcccccatcctgccctgggttcaggcctctgaggagaaaccaaagcctgggctaccccaactcccacagctgggtcccttgaccctgggttggatttgaggctcagttaatctcagctcacgctcagctggcacaagccaggcgcaagcaagtgctgaaggcacagccttgctggggcgcagggagttcaggacttggtcacagtcagccctgaacagcagagctgggatctgaacaggcgctggagcccacacttgctctgagagagaatttatgtcttcacaatcctcccattgaaagtctacaatcctggccgggtatggtggctcacgcctgtaatcccagcactttgggaggctgaggcgggtggatcacgaggtcaggagatgagaccatcctggctaacatggtgaaaccctgtctgtactaaaaatacaaaaattagccgggcttggtggtgggtgcctgtagtcccagctactccggaggctgaggcaggagaatggcgtgaacccgggaggcggaccttgcagtgagctgagattgcaccactacactccagcctgggcgacagagccagactccatctcaaaaaaaaaaaaaaa

SEQ ID NO: 28190 - DNA, 2946 bp, Homo Sapiens
cctattcctttttttctgaagtgtgtaacttctgattttttctttgctatgttgtaaataacagtagctaaattctctgttttactatctacttttcttttcttcccagatcatttcattctaaaactaaattgcttggttttctttagaggaaattgctacatggtatacttgtagtagtgattcatattaaaaaaaatagctggtaaatctttctaggtagtaacttatccaaacaatactttgagtatcatattttgtgaatgacttgcttaaactgggaaactgaatattctttttaaatcatataattcctgtattaaatgtgaaacacacagtctccaaagtcacctgattctctgtggaaaatgaaaggcattgaaggaaaccagatacattaatacttagttttggttgaaagtgcaacattactgtacttagaaggggcttggtttatttttagatatttaagctatcattaattttagaccaatggctaataataagagagatttttggttgctcatttatggagagacaaagaacagcatggcataaacaaacatcccagaaataaatgaaaagttttaagtgataaaattgtgttttctatgaaccagtgttgtacatgaaccaacattgtgtttcttagctctgacctgtacagtgaggtacctgtcaggacccctagtcttggcactggaaatgacaaagttctcctattactaaattctcatgccttccttttctgacttagtagattgaaattggtaggtactaatgatttatgtttgataaacttaagttctgctgatatcctgttactggtaattctggtaccaaaatttcaaacggtttgattattagtagcattttgagtacctaggtgcatataatacagttagcagacccttacagagtcaaaagagattttggaatctggtgatactgttgtttattacactagcctattacattttctttctttataataactgtttatgtgagtttcattgaaaatcgtggctctattgctttattcatggtttccacaactctttttgtaacaccttaattttctctcttaggtattttcctgttaaataagatatcaaaagcatcaatcacaagacagagaaaacgtattaggaaaaacttgtattagtatattctaaactgaaatggaaaaactcattattcatattttaataaataaaactcccaaatgatcttgctaaattatcccactatttagaagtagaaaataagagaagagtgctttcaaggaaatttgtcatattctgccttctatctagaagttgacaatgaattgcaataaaactaagaaataactgaatgctgaaaaataccatgaattaatgttatggcttctttatttttgtatatccattcccacaaaattgaatttaagattattaatgaaaattctatattaagtaataatgcttgtattagtaatgggcaaagaagtctttctttgttacattaaccgttagtaaaagatgtactttgacatttctgatgtaaaacctatatgtaaatattgtaatttaaatatgattggacagctgttaagttttggggagggaagcagatgccagcgttctctgctgaaaagacaagatggcgcttgacggaccacagcagatggagctggaggaggaaaaggcaggcagtggactctgccagtattatctgtccaagattgaagaactccagggtcaactgcaatataaattggatgggggaaagccacaaggaacagttctgaactccaggtgcatttgcagctgattttgaatgataagacccaaaacctctggaggcggcaggtgcacgggaatgaactaaatgttaaagtgtgcctattacaggaggagctacagctgctgcaggaataggactcctgtgtcagggaagtagtccaggccatgggtaagaagaaagtgttggtcaaggtgcatctcaaggacaagtttgtcatagatgtggacaaaaatatcagcatcagtgatgtgacacccagttccttggtggttctaagaaatgacagctacactttgcacaagatcctacccaacaaggtggactcattggtgtcactgatgatggtgaagaaagtaccagattcagcttatgaaatgattggtagactggataggcagatcaagaagatcaaagaagtgatcgacctgcctgctaagcatcccgagctcttcaaagcactgggcattgcacagcccaagggaatgctgcttggaagagactgttggcctgggctctggctcatcatagggactgtgtacctttattcatgtctctggctctgaattggtacagaaattcattggggaatttctgtgatggcagagaaaatgctcatctgtcatcttcatggatgaaattgactcttttggctcctcagagctggagggggatgctggagggaacagtgaagtgcagcagatgatgcttcgagggtggctttgaggccaccaagagtatcacggtttatcacggctgctaatacgattgatatcctggactcggcactgctttgcccagggcacattgacagaaaaattgaattcccaacctgcaatgagtaggcctggctggtcactttgaagattcattctcagaaatgaacctgacccaggggatcaacctgagaaaaattgctgagcttatgccaggagcatcaggctgaagtgaagggcatgtgcacagaaaccggcatgtatgccctgagtagcgagtccatgtcactcagaaggactttgaggtagtccaaagtcctatctcatgccaaaggacagtgaggaaaaacatgtccatcaagaaactatggaattgagggcacatcctttgtgtgtatccctacaataaaactcagtgggacaagcaaaaaaaaaaaaaaaaaaa

SEQ ID NO: 28191 - DNA, 1497 bp, Homo Sapiens
cctgagtagattggaagcagtgacagcacgctcctttgaagaggaaggagagcatttgggcagtagaaaacacagaatgtccgaagaaaaagactgtggtggcggagatgctctctccaatggcatcaagaaacacagaacaagtttgccttctcctatgttttccagaaatgacttcagtatctggagcatcctcagaaaatgtattggaatggaactatccaagatcacgatgccagttatatttaatgagcctctgagcttcctacagcgcctaactgaatacatggagcatacttacctcatccacaaggccagttcactctctgatcctgtggaaaggatgcagtgtgtagctgcgtttgctgtatctgctgttgcttctcagtgggaacggactggaaaacctttcaacccactgctgggagagacttatgaattagtgcgagatgaccttggatttagactcatctccgaacaggtcagccatcacccaccaatcagtgcatttcatgctgaaggattaaacaatgacttcatctttcatggctctatctatcccaaactgaaattctgggggaagagtgtagaagcagaacccaaaggaaccatcaccttggagctccttgaacacaatgaggcatatacatggacaaatcccacctgctgtgtgcataatatcattgtgggtaaactgtggatcgaacagtatggcaatgtggaaattataaaccacaagactggggacaaatgtgtgttgaattttaagccatgtggcctttttggtaaggaattacacaaagttgaaggctacattcaagataaaagcaaaaagaagctctgtgccctctatgggaagtggactgaatgtttatacagtgttgaccctgccacgtttgacgcttacaaaaaaaatgataagaaaaatacagaagagaagaagaacagcaaacagatgagcacccctgaggagttggatgaaatgccagtgccggattctgaaagtgtattcattatccctggaagcgttcttctatggcgaatagccccacggcctccaaattctgcccagatgtataattttactagttttgcaatggttttgaatgaagtagacaaagacatggagagtgtgattcccaagacagactgcaggttacggcctgacatcagagccatggaaaatggagagatagatcaagctagtgaagaaaaaaaacgacttgaggaaaaacaaagagcagcccgcaaaaacaggtccaagtcagaagaggactggaagacgaggtggttccatcaaggtcctaatccctacaatggagcacaggactggatttactctggcagctactgggacagaaattacttcaatttgcctgacatttattaaaatgcatacaagtcagggtgtttggctaatctacaaataagtcttaaacctatgtttttaaatttttttcccttggtttctacttatcttttaaaaaaaaaaaaaaa

SEQ ID NO: 28192 - DNA, 2380 bp, Homo Sapiens
gccgggcagagcggccaagatgtcgcagcccaagaaaagaaagcttgagtcggggggcggcggcgaaggaggggagggaactgaagaggaagatggcgcggagcgggaggcggccctggagcgaccccggaggactaagcgggaacgggaccagctgtactacgagtgctactcggacgtttcggtccacgaggagatgatcgcggaccgcgtccgcaccgatgcctaccgcctgggtatccttcggaactgggcagcactgcgaggcaagacggtactggacgtgggcgcgggcaccggcattctgagcatcttctgtgcccaggccggggcccggcgcgtgtacgcggtagaggccagcgccatctggcaacaggcccgggaggtggtgcggttcaacgggctggaggaccgggtgcacgtcctgccgggaccagtggagactgtagagttgccggaacaggtggatgccatcgtgagcgagtggatgggctacggactcctgcacgagtccatgctgagctccgtcctccacgcgcgaaccaagtggctgaaggagggcggtcttctcctgccggcctccgccgagctcttcatagtccccatcagcgaccagatgctggaatggcgcctgggcttctggagccaggtgaagcagcactatggtgtggacatgagctgcctggagggcttcgccacgcgctgtctcatgggccactcggagatcgttgtgcagggattgtccggcgaggacgtgctggcccggccgcagcgctttgctcagctagagctctcccgcgccggcttggagcaggagctggaggccggagtgggcgggcgcttccgctgcagctgctatggctcggcgcccatgcatggctttgccatctggttccaggtgaccttccctggaggggagtcggagaaacccctggtgctgtccacctcgccttttcacccggccactcactggaaacaggcgctcctctacctgaacgagccggtgcaagtggagcaagacacggacgtttcaggagagatcacgctgctgccctcccgggacaacccccgtcgcctgcgcgtgctgctgcgctacaaagtgggagaccaggaggagaagaccaaagactttgccatggaggactgagcgttgccttttctcccagctacctcccaaagcagcctgacctgcgtgggagaggcgtagcgaggtcggaggggaaagggagatcccacgtgcaagtagggggaatatctcccccttttccctcatagcctctagggagggagagtgacttcattctccatttgaagagattcttctggtgatgtttacttaaaaagtgatccccctcaacaacggatacagcgtgcttattattgggcatttagcctcaaaagcatgtagtaccaagcacttgtatttccgtatattttgtttcgcgggggagtgagggggaagaacacggatgaaaatgtcagtttttgaagggtccatgcacatccctgacacctcacaccttatctaagtctgaagctggggagaaaggggttcatttagacttcatacatttccagtacgactttagtatctctccagagccatattttctcagtccgaattaattccccctccctaggtgcctgtaggctatggtacttcttcctcattgttttctaggtaaacttcactactggtaattaaggggaaggatatgaggaagcagtttaaatagccctgttctcattactctgaccacatacatcatagggtgctaaagttgatgaacacattaatccgttaagtaaaatggactttgtaattgtacagcatacctaagaaactcagaaggtgcatttaagagagagacctgaaagaaatagtatggatttttaaaaattcttgtctctactattataaccaaaaaatatttcttgtatgtcccataaaaatatttgtgtaattcttatgaaacaggctggtagaggaggtttctgagcctagcccaagggcttattcatcaccatgggtaaattatttaaactcacttaattaaggaaaatattttcccagctagaaaagtatactcattctcatttaaactctctcatttggagggatcatgtgagttggcctacttacaagtagtgaaagttcccttttcagttttgttttgttttgttttgtttttctctttcactcagccaaatgtgaaagttgtgaatttaggaaaatcacttgtaatgaagtgtgaatcttgttatcaaatttatttctctgatgtttccttccttatccttgtagccaataaaacattgacattctcacgttttatagatgaggtaaaaaaaaaaaaaaaaaaaaaaaaaaaaaaaaaaa

SEQ ID NO: 28193 - DNA, 1629 bp, Homo Sapiens
caaggcgagaggtgctgccgcctcccgtcgcccctgcgctcagaggtcccgaaccagcccagccgctgcctcttgccgctccgcctttggagtgaggagggcgcagcccgcgtcagaacttagagggccaggcagggtcgcgcgcatggcctgggcgggctcgcggcgggtcccagctgggacgcgcgcggcagccgagcgctgctgccggctctcgctcagcccgggcgcgcaaccggccccgcccccaggccctctgccaccgccgcgaccaatgaggtttctgacctcctgcagcctcctcttgcctcgggctgcccagatcttggcggctgaggctggcttaccttcgagccgttccttcatgggatttgctgctcccttcaccaacaagcgaaaggcttactcggagcgtagaatcatggggtactcaatgcaggagatgtatgaggtggtgtccaacgtccaggagtatcgtgagtttgtgccctggtgtaagaagtctctggtggtatccagccgtaagggtcatttgaaagcccagctggaggttggctttccacctgtcatggaacgttacacctctgcagtttccatggtcaaacctcacatggtcaaggctgtttgtactgatggcaagctcttcaaccacttagagactatttggcgattcagccctggtattcctgcctatcctcgaacctgcactgtggacttttcgatttcctttgaatttcgttctctgctgcactcccagctggccaccatgttttttgatgaggttgtcaaacagaatgttgctgcctttgagcgtcgggcagccaccaagtttggtccagaaacagccatcccccgtgaactgatgttccatgaggtgcaccagacttgaggcaagggattgctccctgacctcccttctaccccacttccctacacaattctcttatttatttggtttggctcctgttccaatttgaaaggagtctgtgttcataatactgtttctcctctcaatttcccagaaattgggttctatgctggctggaaatgttgggggaaagagaaggcaaaggatgtggaaatgagatgtgcttaggaaagggtcaggcccatcgtaggagcaccatatgcctgcagccttttcactacgaattagaataaggactatgtggttgtctctggaccttatcaagacaccttagtgtctgaccaggggacgatagtaacttttctaaggattgaataaattgagcttttcttctggcacagaggtactgagtggtaagtaacttttaccctgcctgagattcctcaggagaaaaggcaacctgcctccagcctgaaatacataaagcctcattttaagactgtaagtccatgctgcctggctactagagagcaaggggctttcttaccaccagtgctgaggagaaaagtactgaacggaaacggagttgtctttgtactcttgagttgtaccttattcttccacttggcctgagtttttataaaatttcaataaattgtgacagtgtgaaaaaaaaaaaaaaaaaaaaaaaaaaaaaaaaaaaaaaaaaaaaaaaaaaaaaaaaaaaaaaaaaaaaaaaaaaaaaaaaaaaaaaaaaaaaa

SEQ ID NO: 28194 - DNA, 1558 bp, Homo Sapiens
ggctggaagaggcggcggcgtgatgcggcccgtggacgcggacgaggcgcgggagccccgcgaggagccgggcagcccgctgagccccgcgccccgcgccggccgcgagaacctggcctccctggagcgcgagcgcgcccgggcgcactggcgggcccgcaggaagctgctggagatccagagcctgctcgacgccatcaagagtgaggtggaggcagaggagcggggcgcccgggccccagcaccccgcccgcgtgcggaggctgaggagcgggtggctcggctgtgcgccgaagcagagaggaaggctgcggaggcggcgcggatgggcaggcggatcgtggagctgcaccagcggatcgccggctgcgagtgctgctgagccggcgaggccgcgcgggtctggagcggagcgcggcggggagtgtcccgcgtggaaggcgctgggtggccaactgacgaactgtgttcacctgataaggagtcgtggctgcttggacaggctcaaaccaagagagcctttcgttttgtctcccctgtttttctgcctgcgttttctccacattagccactcaatttccagtaccatcctggcggatgacttcagcattagatggtcaggtgtatttttttattaataggcgcattcagtttggaaaagacagcttttcattaatgtcccacgtaaaggaatatggcctatacagtacgtacgctgctgcgtggtcatatttgttcctgtgatcttattgtattttcaaagtttggaagtatactcgtgtgctttgctgtttttttatgcttcctggaatttggggactcatgagagacttgaggttagagttctgcaagtgagaagacactacatggttgcagctgccacatgaagaacccaagctcctgtcaaagttgtgaatgcgactttggatgagattaagaaggcccagtggttggtcttgaagagtggcagtgtgtggatttgaggacctctgcagaccatcagatcaaaggagggagagctgttttgggtgttttgttttttttgtttttatagcattttgctttttcttggaatgtaattttcctatggcatgttaactggtgcacatcgtgtaacctgtctggtgagcaacctacaattgggatgagttctaggtacatgtgtttgctgactttggggtaaacaactttgttataatacagtctctgccacagatgcatgtgacctcttcaggggcccagagtggctgaggaaggaaagcttcaagctggccatgggggtcccaaacagtcattccaggcttagatgatgactagcctaggtcatcagagcccagactccacagagactaaaatcagagctctgtcttgttatgataaatttcatttgcttggaaaaagaaatgctgaaagccagtgtttagaatctttgtgcagatgaccaaagcaattgacttggccaagaaaaggtaaggtaaataaacatttttcaaaatgaaaaaaaaaaaaaaaaaaaaaaaaaaaaaaaaaaaaaaaaaaaaaaaaaaaaaaaaaaaaa

SEQ ID NO: 28195 - DNA, 2249 bp, Homo Sapiens
cagttggtaagccctaatatacactacataaaaacgttagggctgcctgtaatcccagcactttgggaagctgaggtgggtagatcacttgaggtcaggagttcgagaccagcctggccaacatggcgaaaccctgtctctactaaaaatacaaaattttagctgggtgttatggtgggcacctgtaatcccagctactttgaagatgaggtagcagactcacttgaaccagggaggcggaggttgcagtgagccaagattttgccactgcactccagcctgggtgacagagcaagactctgtctcacaaaaaaaaaaaaaagggggctgtacataggcagcaaactaagctgcagtgatgttgcctatatttaaattttctcaaatggccaagctctgatggtctactttatttgagcaatagttgagacttataattgcctataaataaacaaacaaatgaactatttgtttttttttctcacaacatctggcctatattgtctgtcaggaagccatggctccaatgtaaagtacatagttcttacatacttcaactgcagctggtccctgacctcaccaggtttcagagatgttcttaaaggaagccagctgtggcaggtcacagattcatgggaaatggaaagaaccaaggaatatagctcttgcctcacctttctacccactgcagatatagttcaagccagagtaatggaagaacttaacttactagcctctcaggctgctcctatccctacctcccagtgtacagcccctccccatctctttagtcccctttccctcacttccccttttataatgtcacacaaatcagggacagtaggatcacattataacctactttgtcatagggattcgatttttcttatatcaaatcatgtttcctgaaacccagctggggcatatgcactcaatgtctaatacatacttattaatgtaccggatattggccttgcccctggatatcagcaatatattataaaaggttccagtagatgagacgattgagtctgaatacaattgcagtaaattgtgccaataaagatattgtactgttacggtcttagagttaaagccgcttgaatgcagcatgcacattcatgtaaacagacaatcagggtaggcctagaataaccacaaaaattctattggccttactgcagccacctatatgtagaacaatggaggagatagtttgtggtccattattgtaccctgtttcatccattagcatcagaatctctctttcaggtcatttattaaatatgattgaaatgtttaaaagttcctgaacatgattcatgatgattaaaatatcatacaactgataaaagactttaagaactttatatatttcctgttgcctcaaaatgtaacagaaattattcttagagctttgattttagctatcctaattactgcaaataaatatttgttcttatagttttaaatcaaaaagaaaagtcttgttataaaaccttaagcttgaaatcatattaataaaatgtattgtacatagtggaaaattttcagtagctaatttaaaatttcagaaaatgctattaaagaattttgattcaagtatttaaactgtttagttatgcatgcttcttattaaccgaaaatgataataccatttagtttagtgatcagtatgagaagcaatacctaatcctatgttgctattgtattttttcctagttggtgtgcctgctcagaaaaacatatactgtatgtgtatacatacctgtgtatatataaaaggtcaatttatatatttttctataggaaaatggagtaacaagttccctatctcccatatttatttgtccatagtaaaatggccacattgatgataatttctagaactagtttctgagattgtcagccctttgtctaaaataatggcagtattaatgattgacttctgtcactgccatagttacctggattgtcagccttggtagcctttgtctaaagtcctaaagagttccaaaaaaaatgtgttgaaatttaattgctaaatagtggttggtgattctttacagtaggaattgtaataattttcttgcaaataagttatttactgctattgatattgaataatttgtcttttattcagatatatttcaaaaagcatgaatatatgattattcataaattgtatactttaccagtaagttttcagaggaaataaagacttttaaatccttttaaaaaaaaaaaaa

SEQ ID NO: 28196 - DNA, 1421 bp, Homo Sapiens
tgtgcttgaggttgggggttgcgtcgctctctggtaaaggcgtgcaggtgttggccgcggcctctgagctgggatgagccgtgctcccggtggaagcaagggagcccagccggagccatggccagtacagtggtagcagttggactgaccattgctgctgcaggatttgcaggccgttacgttttgcaagccatgaagcatatggagcctcaagtaaaacaagtttttcaaagcctaccaaaatctgccttcagtggtggctattatagaggtgggtttgaacccaaaatgacaaaacgggaagcagcattaatactaggtgtaagccctactgccaataaagggaaaataagagatgctcatcgacgaattatgcttttaaatcatcctgacaaaggaggatctccttatatagcagccaaaatcaatgaagctaaagatttactagaaggtcaagctaaaaaatgaagtaaatgtatgatgaattttaagttcgtattagtttatgtatatgagtactaagtttttataataaaatgcctcagagctacaattttaaaaaatgatttagcacaagctaaatctcaaagccttggtataattttcttgtttaaatttggggattttaaatcagattatagtttagaatatttgcgtattaattatgggcaagcacacaccttctgaatagaaatattgttcattactcatttagcagataatttgggacctatgtctacttttcaaggcaaagtgaagatgacagtccttgctctcagggagcccccactttaatgggagactgataaactggtaattagactgtgataaatagtatgatggaaattagcttaagctgtttaagtagggactcttcttattcggtggaaaggctgttccaggtacaggcaactggcctggcaacttggatacttggaaccttgtatttaaaagtgaatttaaccacaactgagacctaagaaattgacctaggggtgtgtgtgtgtgtgtattctatgtacatataaaccatttttatttcacgcattaaaaatagtatgataaagatttcagagtacaggtctggtacaatcacagttcattgcagcctcaacctcctgggtttaagcagtcctcccgcctcagcctcccaaagtactgggattacaggcatgagtatttacattgtattcagctagccccttaaaggtaatgaccatttataaattattccttcagttggctatttcttgacataatcaaacttctgcaattgttatgattaagcttaaaccctgttagcaaaactgaaaactgaaatgttctcaatatcaacatatttaatttggactctttagaatttatacactaataaatttaaatgatgtttaaaggcaaaaaaaaaaaaaaaaaaaaaaaaa

SEQ ID NO: 28197 - DNA, 1351 bp, Homo Sapiens
tgcccttcacaaaggaaatccctgattattgtttgaaatgctgaggacgttgctgcgaaggagacttttttcttatcccaccaaatactactttatggttcttgttttatccctaatcaccttctccgttttaaggattcatcaaaagcctgaatttgtaagtgtcagacacttggagcttgctggggagaatcctagtagtgatattaattgcaccaaagttttacagggtgatgtaaatgaaatccaaaaggtaaagcttgagatcctaacagtgaaatttaaaaagcgccctcggtggacacctgacgactatataaacatgaccagtgactgttcttctttcatcaagagacgcaaatatattgtagaaccccttagtaaagaagaggcggagtttccaatagcatattctatagtggttcatcacaagattgaaatgcttgacaggctgctgagggccatctatatgcctcagaatttctattgcattcatgtggacacaaaatccgaggattcctatttagctgcagtgatgggcatcgcttcctgttttagtaatgtctttgtggccagccgattggagagtgtggtttatgcatcgtggagccgggttcaggctgacctcaactgcatgaaggatctctatgcaatgagtgcaaactggaagtacttgataaatctttgtggtatggattttcccattaaaaccaacctagaaattgtcaggaagctcaagttgttaatgggagaaaacaacctggaaacggagaggatgccatcccataaagaagaaaggtggaagaagcggtatgaggtcgttaatggaaagctgacaaacacagggactgtcaaaatgcttcctccactcgaaacacctctcttttctggcagtgcctacttcgtggtcagtagggagtatgtggggtatgtactacagaatgaaaaaatccaaaagttgatggagtgggcacaagacacatacagccctgatgagtatctctgggccaccatccaaaggattcctgaagtcccgggctcactccctgccagccataagtatgatctgtctgacatgcaagcagttgccaggtttgtcaagtggcagtactttgagggtgatgtttccaagggtgctccctacccgccctgcgatggagtccatgtgcgctcagtgtgcattttcggagctggtgacttgaactggatgctgcgcaaacaccacttgtttgccaataagtttgacgtggatgttgacctctttgccatccagtgtttggatgagcatttgagacacaaagctttggagacattaaaacactgaccattacgggcaattttatgaacaaga

SEQ ID NO: 28198 - DNA, 1870 bp, Homo Sapiens
ctttccaagaccctgcccggccctgccccatcctcagccccgagtcaccatgggcagcgtcagtagcctcatctccggccacagcttccacagcaagcactgccgggcttcgcagtacaagctgcgcaagtcctcccacctcaagaagctcaaccggtattccgacgggctgctgaggtttggcttctcccaggactccggtcacggcaagtccagctccaaaatgggcaagagcgaagacttcttctacatcaaggtcagccagaaagcccggggctcccatcacccagattacacggcactgtccagcggggatttagggggccaggctggggtggactttgacccgtccacaccccccaagctcatgcccttctccaatcagctagaaatgggctccgagaagggtgcagtgaggcccacagccttcaagcctgtgctgccacggtcaggagccatcctgcactcctccccggagagtgccagccaccagctgcaccccgcccctccagacaagcccaaggagcaggagctgaagcctggcctgtgctctggggcgctgtcagactccggccggaactccatgtccagcctgcccacacacagcaccagcagcagctaccagctggacccgctggtcacacccgtgggacccacaagccgttttgggggctccgcccacaacatcacccagggcatcgtcctccaggacagcaacatgatgagcctgaaggctctgtccttctccgacggaggtagcaagctgggccactcgaacaaggcagacaagggcccctcgtgtgtccgctcccccatctccacggacgagtgcagcatccaggagctggagcagaagctgttggagagggagggcgccctccagaagctgcagcgcagctttgaggagaaggagcttgcctccagcctggcctacgaggagcggccgcggcgctgcagggacgagctggagggcccggagcccaaaggcggcaacaagctcaagcaggcctcgcagaagagccagcgcgcgcagcaggtcctgcacctgcaggtactgcagcttcagcaggagaagcggcagctccggcaggagctcgagagcctcatgaaggagcaggacctgctggagaccaagctcaggtcctacgagagggagaagaccagcttcggccccgcgctggaggagacccagtgggaggtgtgccagaagtcaggcgagatctccctcctgaagcagcagctgaaggagtcccagacggaggtgaacgccaaggctagcgagatcctgggtctcaaggcacagctgaaggacacgcggggcaagctggagggcctggagctgaggacccaggacctggagggcgccctgcgcaccaagggcctggagctggaggtctgtgagaatgagctgcagcgcaagaagaacgaggcggagctgctgcgggagaaggtgaacctgctggagcaggagctgcaggagctgcgggcccaggccgccctggcccgcgacatggggccgcccaccttccccgaggacgtccctgccctgcagcgggagctggagcggctgcgggccgagctgcgggaggagcggcaaggccatgaccagatgtcctcgggcttccagcatgagcggctcgtgtggaaggaggagaaggagaaggtgattcagtaccagaaacagctgcagcagagctacgtggccatgtaccagcggaaccagcgcctggagaaggccctgcagcagctggcacgtggggacagcgccggggagcccttggaggttgacctggaaggggctgacatcccctacgaggacatcatagccactgagatctgaggggctgcctgggaaggcgagtctggggac

SEQ ID NO: 28199 - DNA, 3745 bp, Homo Sapiens
ggggccgcgctcgctcagccgccgccaccacacggagcagacgcgcgccgggagccgcgggccgggccagccgggccgccggggcccagtgcgccgcgctcgcagccggtagcgcgccagcgccgtaggcgctcgctcggcagccgcggggctctaggccgtgccggggagggggcgagggcggcgcccaggcgcctgccgccccggaggcaggatgagcatcgagatcccggcgggactgacggagctgctgcagggcttcacggtggaggtgctgaggcaccagcccgcggacctgctggagttcgctctgcagcacttcacccgcctgcagcaggagaacgagcgcaaaggcaccgcgcgcttctgccatgagggcaggacctggggggacctgggcgccgctgccgggggcggcacccccagcaagggggtcaacttcgccgaggagcccatgcagtccgactccgaggacggggaggaggaggaggcggcgcccgcggacgcaggggcgttcaatgctccagtaataaaccgattcacaaggcgtgcctcagtatgtgcagaagcttataatcctgatgaagaagaagatgatgcagagtccaggattatacatccaaaaactgatgatcaaagaaataggttgcaagaggcttgcaaagacatcctgctgtttaagaatctggatccggagcagatgtctcaagtattagatgccatgtttgaaaaattggtcaaagatggggagcatgtaattgatcaaggtgacgatggtgacaacttttatgtaattgatagaggcacatttgatatttatgtgaaatgtgatggtgttggaagatgtgttggtaactatgataatcgtgggagtttcggcgaactggccttaatgtacaatacacccagagcagctacaatcactgctacctctcctggtgctctgtggggtttggacagggtaaccttcaggagaataattgtgaaaaacaatgccaaaaagagaaaaatgtatgaaagctttattgagtcactgccattccttaaatctttggagttttctgaacgcctgaaagtagtagatgtgataggcaccaaagtatacaacgatggagaacaaatcattgctcagggagattcggctgattcttttttcattgtagaatctggagaagtgaaaattactatgaaaagaaagggtaaatcagaagtggaagagaatggtgcagtagaaatcgctcgatgctcgcggggacagtactttggagagcttgccctggtaactaacaaacctcgagcagcttctgcccacgccattgggactgtcaaatgtttagcaatggatgtgcaagcatttgaaaggcttctgggaccttgcatggaaattatgaaaaggaacatcgctacctatgaagaacagttagttgccctgtttggaacgaacatggatattgttgaacccactgcatgaagcaaaagtatggagcaagacctgtagtgacaaaattacacagtagtggttagtccactgagaatgtgtttgtgtagatgccaagcattttctgtgatttcaggttttttcctttttttacatttacaacgtatcaataaacagtagtgatttaatagtcaataggctttaacatcactttctaaagagtagttcataaaaaaatcaacatactgataaaatgactttgtactccacaaaattatgactgaaaggtttattaaaatgattgtaatatatagaaagtatctgtgtttaagaagataattaaaggatgttatcataggctatatgtgttttacttattcagactgataatcatattagtgactatccccatgtaagagggcacttggcaattaaacatgctacacagcatggcatcacttttttttataactcattaaacacagtaaaattttaatcatttttgttttaaagttttctagcttgataagttatgtgctggccttggcctattggtgaaatggtataaaatatcatatgcagttttaaaactttttatatttttgcaataaagtacattttgactttgttggcataatgtcagtaacatacatattccagtggttttatggacaggcaatttagtcattatgataataaggaaaacagtgttttagatgagagatcattaatgcatttttccctcatcaagcatatatctgcttttttttattttgcaattctctgtattctatgtctttaaaaatttgatcttgacatttaatgtcacaaagttttgtttttttaaaaagtgatttaaacttaagatccgacattttttgtattctttaagattttacacctaaaaaatctctcctatcccaaaaataatgtgggatccttatcagcatgcccacagtttatttctttgttcttcactaggcctgcataatacagtcctatgtagacatctgttcccttgggtttccgttctttcttaggatggttgccaacccacaatctcattgatcagcagccaatatgggtttgtttggtttttttaattcttaaaaacatcctctagaggaatagaaacaaatttttatgagcataaccctatataaagacaaaatgaatttctgaccttaccatatataccattaggccttgccattgctttaatgtagactcatagttgaaattagtgcagaaagaactcagatgtactagattttcattgttcattgatatgctcagtatgctgccacataagatgaatttaattatattcaaccaaagcaatatactcttacatgatttctaggccccatgacccagtgtctagagacattaattctaaccagttgtttgcttttaaatgagtgatttcattttgggaaacaggtttcaaatgaatatatatacatgggtaaaattactctgtgctagtgtagtcttactagagaatgtttatggtcccacttgtatatgaaaatgtggttagaatgttaattggataatgtatatataagaagttaaagtatgtaaagtataacttcagccacatttttagaacactgtttaacatttttgcaaaaccttcttgtaggaaaagagagctctctacatgaagatgacttgttttatatttcagattttattttaaaagccatgtctgttaaacaagaaaaaacacaaaagaactccagattcctggttcatcattctgtattcttactcactttttcaagttatctattttgttgcataaactaattgttaactattcatggaacagcaaacgcctgtttaataaagaactttgaccaaggctataaatgccacgtacattattttcagtattgttggttatatttaaattttccttacaataaagcacacttttataataaaatacatgaattattgtttttcatacttttttgcttgtttctttaaagttttctgacgtgcataatgcataattcattgaaaagcatgatagcaatgtggcatgtggaagcgaacccccagggcataacatagtaagaaagtatggttctgtatggcaataggtttttaaaattattagctattcatcatgtgtgggagaaataattgtggtgtgttgcagatttatttggccatttagaataaccaaatcaatctggctaactaggaatttatgtgtaaaattatctgattaaaacagctcaagtttgaaaaaaaaaaaaaaaaaaaaaaaaaaaaaaaaaaaaaaaaaaaaaa

SEQ ID NO: 28200 - DNA, 4351 bp, Homo Sapiens
gtggcagagtgagtttacccctatgagactgtgagaggcccggggcctacctcaaaggagcggggtcgcgaagctagctagcagcggcccccctccaggtccccgggcccggcggcgcggcggcggcttggttgtgaagaggcggggaagcgggtgtccggtccccgccatggagggcatggacgtagacctggacccggagctgatgcagaagttcagctgcctgggcaccaccgacaaggacgtgctcatctccgagttccagaggctgctcggcttccagctcaatcctgccggttgcgccttcttcctggacatgaccaactggaacctacaagcagcaattggcgcctattatgactttgagagcccaaacatcagtgtgccctctatgtcctttgttgaagatgtcaccataggagaaggggagtcaatacctccggatactcagtttgtaaaaacatggcggatccagaattctggggcagaggcctggcctccaggggtttgtcttaaatatgtcgggggagaccaatttggacatgtgaacatggtgatggtgagatcgctagagccccaagagattgcagatgtcagcgtccagatgtgcagccccagcagagcaggaatgtatcagggacagtggcggatgtgcactgctacaggactctactatggagatgtcatctgggtgattctcagtgtggaggtgggtggacttttaggagtaacgcagcagctgtcatcttttgaaacggagttcaacacacagccgcatcgtaaggtagaaggaaacttcaacccttttgcctctccccaaaagaaccgacaatcagatgaaaacaacttaaaagaccctgggggctccgagttcgactcgatcagcaaaaacacatgggctcctgctcctgacacatgggctcctgctcctgaccaaactgagcaagaccagaatagactgtcacagaactctgtaaatctgtctcccagcagtcacgcaaacaacttatcagtagtgacttacagtaaggggctccatgggccttaccccttcggccagtcttaaacgggtgtcagcaagaagaaaaattaacaaaagacagaaggcctgactttggggggttagggcaaggggttcctctggattgcagaccacatcgcacagacccctggctctgaccccctctcatcccggaagaagaggaagaagcagaacagactagttttgagtaaactcagtatgcatgtgtgaatgctgaatcacaggaatggtgttgaggctaccaagaagaaatccatgcagccactttgggttttgttataggcatcagtctaacaagtcattaggtcactcgggaagggggaaaaagtttaaaatgggggaaaaaaagccatctttttaaacaaaaattattttgcctacagaaaggttgtagttttgagcacatgttaatttttttccctctttccccacttttatttttttaaataagggataacatattctttatagaatagtgcttgttctggaagagattcaggtgaaaagttggcgtggcatgtttgaggactctgcggatcagtgctacaggagtacatctgccctgccacatgactccagaagtctctgaccccatttgtttttaatggcatcagccaatgagttatcacccttttcctcctcttttctctttaatcttctgttgatttacacctttgacatttgtattcgtcaaccctgtggcttgttagcatcagaacctctctgaagaccaaacttccctgtgtggccagcagaggaagccttgaggatagatctcgggtgacgtgggattttctaagcctgagaggtgtccttctgcacacccttgtaacaattaaaattgcttttcttccatgtttctcttggcagagagaaatgccatcatgcttactgctcttttggattcttcatgcagtggcttcccatttgctctgggaacagtgcctctgtgctggttatatgtatgcaccacatgtgcacacacgggtgtcggtgcaactcaccagcaggtgtgcagtaggcaagcttgaaggtggcccatgcttctctgttgtcacacaacacctttccctgtttctcttcagttgtcctctgatattttcacagcctgttagtggcggctgatctgtagaggtatgaaaatacagccccaaagggggaatttgtcatggggaagggccagccactgactacttgatcttggagaccacatttagatggaaatgagaggacctccacagccccgcctccctgccaggatgctagattattggctgggaggtgggcaagtggcagcccagctgaagcaagaggctgattgactggctgctcactcaggcaggtggcctgccctggcatcctgtagattctgagcaggttgagatgtggatatctccatgggaagcttgaaccaggctagaacagctgtctgccaaagatacaagaatatgcaaagtccctcttacccccctccttccctcaagtcttagttggtttgagagccagggatatggatccagggtgctgttgcagggtcacctgcctgttaccacacccccatccagctgggtggtgggtgagggtgtgagacaggcagggagaccaggtaatgagtggctgcaaggagtcatatagcctgggtgtgggtgagggtctgcctgcctgtttctgtctgggtgtctgagttccaaaaaatgtgtgttgtttgttcctcctcatcctcttctgagactgttgtttttttagagcttgattgtgggagaaaagcttgtgtgaaattccctcttcacctccccaccccccaaaaaataaaagggggcataaactttattccactggagaagccctgggggtggctggagccagcctgctgagaagcgtggtgcagctgggtctgggacttcactagagcttactctggagcacctattttctgtgcacatgggagtgctccactccctagcagagcagagggaagtctctgccaggtacccacgccacaggcctcaggatggctttttgtctgagggcctcattaggcccagactgctgctgctggtaccagtctcctgagacactgcctccctggagcccatgcatgcccagctgttcttactgcttagtagccttgaagcagcacatctccactgtccctggcaggattgtgggaggcttcacaacccctgctttcctgacttcctcttctgcccaacactgggtgccccttcccagtttcccagcaggggcttcatgggccaccgtcagtgggtctgggcctgccagagtcgtcttgctcttcctcttgcttctaggcaaccacacttggcaagttaaatgtcccaagcaccttgtctcccttcccaagaacaaaccatttctgtgcacatccttggaggcgagatgagctccttgcagagggccagagtaagtgcaagtcatggagtgcaggcagaggggtccatggcttccccagcccagggagggtatcagtatcattcattctctctcccctcactggtatgggttcagagcaatgcctagggcccctctctgctcccctgcctagtggggtggtagtggctacctctcagccccaatagtccctgctcctcttagaatcttcaccaagtggcaggccacctctgggcaggaccacctgcgtctggcacccaggaggtgaggcagacaccatggttaggtgatagggtctgaacccagttggggagacagaggggttcagacttgggaagaatctgtcagtgtgcatggagtgaggtgtgtgtgtgtggatggatgtgcacgtgtgcatgctttttttctttttgccgtgaggacagttgaatttggggcatttttctacaagaagcagtcagccttctctcccccataaggactggctgtaaccttaagcccatcaaagttacttccagcctggagagaacctcaccaaacagctggtgtggcctgagggtggccatggtgggaaatgggcatgagaataaatacctccccaaattcaatctgagcccagcaggagaggatggtagggttgccagggctcagaagtgcaagctgattactcaccccaccctgcctcgccgcacctttcctttgtttccttgggtgaatgcaggagcagcagtggctgcccttcccacctggacagtggtgtgtgtagaaagccagctggatgtttgtggtggggcctcatggtgcctaggaggagataaagatgaggaggtttttccttattgtataaatgaatatttgtatgattaaattaacacacacaccaaaaaaaaaaaaaaa

SEQ ID NO: 28201 - DNA, 4523 bp, Homo Sapiens
gaaaaacctgaagggcaggcagagctgctcccgaacttgtgaccttctctgaggttgcagcggctcttgtagaacatgactctgggacatcacttccttttgttttctttcggagctgaaccaaagaatgtgcaccctctttctctagtgctgtggtgtctgcttatttttgtatttgtgctttccatccatcttctgtgatcacaaggcattcttaaggttttctagcacgacttgcggacatccagactcgtggggggcccacccatggctcggtaagccagcagcccagggcactggcactaccatgaggcactgcattaattgctgcatacagctgttacccgacggcgcacacaagcagcaggtcaactgccaagggggcccccatcacggtcaccaggcgtgccccacgtgcaaaggagaaaacaaaattctgtttcgtgtggacagtaagcagatgaacttgcttgctgttctcgaagtgaggactgaagggaacgaaaactggggtgggtttttgcgcttcaaaaaggggaagcgatgtagcctcgtttttggactgataataatgaccttggtaatggcttcttacatcctttctggggcccaccaagagcttctgatctcatcacctttccattacggaggcttccccagcaaccccagcttgatggacagcgaaaacccaagtgacacaaaggagcatcaccaccaatcctctgtaaataatatttcatacatgaaggactatccaagcattaaattaattatcaacagcatcacaactaggattgagttcacgaccagacagctcccagacttagaagaccttaagaagcaggagttgcatatgttttcagtcatccccaacaaattccttccaaacagtaagagcccctgttggtacgaggagttctcggggcagaacaccaccgacccctacctcaccaactcctacgtgctctactccaagcgcttccgctccaccttcgacgccctgcgcaaggccttctggggccacctggcgcacgcgcacgggaagcacttccgcctgcgctgcctgccgcacttctacatcatagggcagcccaagtgcgggaccacagacctctatgaccgcctgcggctgcaccctgaggtcaagttctccgccatcaaggagccacactggtggacccggaagcgctttggaatcgtccgcctaagagatgggctgcgagaccgctatcccgtggaagattatctggacctctttgacctggccgcacaccagatccatcaaggactgcaggccagctctgcaaaggagcagagcaagatgaatacaatcattatcggggaggccagtgcctccacgatgtgggataataatgcctggacgttcttctacgacaacagcacggatggcgagccaccgtttctgacgcaggacttcatccacgcctttcagccaaatgccagactgattgtcatgctcagggaccctgtggagaggttgtactcagactatctctactttgcaagttcgaataaatccgcggacgacttccatgagaaagtgacagaagcactgcagctgtttgaaaattgcatgcttgattattcactgcgcgcctgcgtctacaacaacaccctcaacaacgccatgcctgtgaggctccaggttgggctctatgctgtgtaccttctggactggctcagcgtttttgacaagcaacagtttctcattcttcgcctggaagatcatgcatccaacgtcaagtacaccatgcacaaggtcttccagtttctgaacctagggcccttaagtgagaagcaggaggctttgatgaccaagagccccgcatccaatgcacggcgtcccgaggaccggaacctggggcccatgtggcccatcacacagaagattctgcgggatttctacaggcccttcaacgctaggctggcgcaggtcctcgcggatgaggcgtttgcgtggaagacgacgtgagagctgaattgttgctgcacgtgctgggcccgccaatgccgtcatcatcaggattttacaaatctctttgcggggaactgtttcactcatggtatggaaaaccccaggactctgccactctaggcacacatgaattataaccattttggaatttccttcgtgatgttcgagagctcagcaatggacccctcacagagctcctctatccgaggccattggagaccccagtttctcaagaattcagctctgctctgagcgtcctggagcttggggatgcagccagctggcctgcactgggtgtggagagaacacctagggaaggcagcctggccctgcccgcctccgccttctggagagcctctgggttctgagtcagcaagccagaggtcatgccacaggcctggctggaacttacacttcacgttccctttttttccccctagagatggggtctcgccgtgttgcacagactgtctgtattcaatggctatcttcacaggtgtgatcataccacattcacttctgaaacactcttgttgcgatcgctaacctcactgggacagagaaccgcagtctttcgagaatggaggctcttcattttttttttctcctttactccaaactcagccctccagtttcttcagatgtaaaccctgttaacgtcactgtttccaaaaggaaaaaaataagtcagtttttggcagcaccttcatctttctgacctcctcctattctgtccttgtggacttatgtttaacatagaaaatgaatgcgtttaaaacaaaaccactttctgcatttaaccagtcctggctctctctctctgctgcctcttcatacgttttctcaagaacttcagtttataattggaagagaaatttttgctgttaatgccagaatgagcaacctcaaggaattgaacacttcttggaaaatctaggtaattcaagccctcatcaggtttacaagatcatcagagaaacagaggattttaatttttagttctggccggctacaggctccatttctctgccttcccattggaaatagtttatttccacattctccactgcgtgtggtcaaagttcctcacccagcaagggactatagatactcgtgtcccaattccaaaacacaatgcacaagctgaacttgggctgaacgtggcgtgttgagatttggaatgaggtttctaagagccgtgttcttcatggaattttccaggccacttggcagcttggtttaccgatggatgggctagagatcttgtcgtttcttggaagtcacagggaagattgaagagaacgcttgagcatccttggcaacagcccaggtgggacctggatgaagctttgcactcaagtattgtcaagggaagcttcctgtgaaccaaagttctcaggccaaggtctcgcccaccaaagccagaaagtgcaagcacccgtccacccagctctaacttgtatgtgtgagacagaccaggcttcgggggtaggaggatctgcagttgttcagccgtctttctgctggtgttgtctttctgccatcagagaagggacacacagcccgttcaaaggtgtgcagagggctctgagcgccaggatggccagggctgtttttgctactgaaggagcgtgtgtcctgaactcccacttgcagggacagtccccaccttctctatagccggcactgggagcagccgccagcagggaaatctggcctgagcacaaggatgctttagggagagatcacttcagtgtgtgtgtatatttatttgcagtacagtgcgcgcgtgtgtgtgtgtgtacgcgcacgtgtgggtgagtgcgtcttctgagtgggttctgttcagttgctaatgaggctcctccgctctggacacaacccttttatagattaatttctctgccaattaacttgtcattttcagtacatattttactattccacaccaaccataattacaacaagggatttttcttatgcactcctatgcatgtgaataacatgtggtgtaattctgcttcttacagaagtattactgaaggtattatttccaatattatttggtttattatgcggatcttttttatatatgcagtcccatcccttctgtgccactcaatgccatccagacatggtttttccctccaggggcctttctccagagggcacttcggctgcctctgcttcctctcattcgaggcccggctcttgctgacagaataggttccgttctgggcggtggttctcgagcctgccattcaaaaccaaagcaaattggagcatttctcacaacatggtattgaagttcctttttgttctcaaaagttgtgaccgtgttaaattgtactcccttagtcctgtaaggtatgttaagtgaatcgcagttacgctgtacttttattaatatttaacataattaaagatggacccataagagtgacgcctgtggagcgcgtgctcttcctctgcagccaagcaaaaaaaaaaaaaaaaaaaaaaaaaaaaaaaaaaaaaaaaaaaaaaa

SEQ ID NO: 28202 - DNA, 1525 bp, Homo Sapiens
gccgcccgggggcttttgccagcggcgccgcgggcctgcgtgctggggcagcgggcacttcttcgacctcgtcctcctcgtcctgtgcggccggccgggtgaggccgggcccgcgtagggggcagtcggcggctgcctccggcggaggtgcctcgcggcgcccgggccggcccgcgcctcggcggcgtgctccatgcatccggagcccgccccgcccccgagccgcagcagtcccgagcttcccccaagcggcggcagcaccaccagcggcagccgccggagccgccgccgcagcggggacggggagcccccgggggccccgccaccgccgccgtccgccgtcacctacccggactggatcggccagagttactccgaggtgatgagcctcaacgagcactccatgcaggcgctgtcctggcgcaagctctacttgagccgcgccaagcttaaagcctccagccggacctcggctctgctctccggcttcgccatggtggcaatggtggaggtgcagctggacgctgaccacgactacccaccggggctgctcatcgccttcagtgcctgcaccacagtgctggtggctgtgcacctgtttgcgctcatgatcagcacctgcatcctgcccaacatcgaggcggtgagcaacgtgcacaatctcaactcggtcaaggagtccccccatgagcgcatgcaccgccacatcgagctggcctgggccttctccaccgtcatcggcacgctgctcttcctagctgaggtggtgctgctctgctgggtcaagttcttgcccctcaagaagcagccaggccagccaaggcccaccagcaagccccccgccagtggcgcagcagccaacgtcagcaccagcggcatcaccccgggccaggcagctgccatcgcctcgaccaccatcatggtgcccttcggcctgatctttatcgtcttcgccgtccacttctaccgctcactggttagccataagaccgaccgacagttccaggagctcaacgagctggcggagtttgcccgcttacaggaccagctggaccacagaggggaccaccccctgacgcccggcagccactatgcctaggcccatgtggtctgggcccttccagtgctttggccttacgcccttccccttgaccttgtcctgccccagcctcacggacagcctgcgcagggggctgggcttcagcaaggggcagagcgtggagggaagaggatttttataagagaaatttctgcactttgaaactgtcctctaagagaataagcatttcctgttcttccagctccaggtccacctcctgttgggaggcggtggggggccaaagtggggccacacactcgctgtgtcccctctcctcccctgtgccagtgccacctgggtgcctcctcctgtcctgtccgtctcaacctccctcccgtccagcattgagtgtgtacatgtgtgtgtgacacataaatatactcataaggacaaaaaaaaaaaaaaaaaaaaaaaaaaaaaaaaaaa

SEQ ID NO: 28203 - DNA, 2970 bp, Homo Sapiens
gggacctttagagagttagcaataaggctggagaaggaaaagccggcgcgcccgcggcccgcgcgatttcccgccgagcccgcgtccccggcggcgggcgggctccgggggcgcccgggccgcggcggcggcggcggcgcgagctgcgcctccgggccggtgaatcatcccggcagacaccaagagccgcggcagcagagaggagcgctgaaacatggctgaagcggccacgggctttctggagcagctcaagtcctgcatagtttggtcttggacgtatctgtggaccgtgtggttcttcatcgtgctattcctggtctacatcctgcgggtgcctttgaaaatcaacgacaacttgagcacagtgagcatgtttttgaacacattaacaccgaagttctacgtggccctaacaggcacttcctcactaatatcagggcttattttgatatttgaatggtggtattttcgcaaatacggaacttcattcattgaacaagtctcagtaagccacttgcgcccccttctgggaggggttgacaacaactcttccaacaattctaattccagtaacggggactcagattccaataggcaaagtgtctcagaatgcaaagtatggcgaaatccactaaatttatttaggggtgctgaatacaatcggtatacttgggtgacaggacgagagcctcttacttactatgacatgaatctctctgcccaagaccaccagacattctttacttgtgactcggaccatctgcgtcccgcagatgcaataatgcagaaagcctggagagagagaaacccccaagctaggatttctgcagctcatgaagccttggagataaatgaaattaggtccagagttgaagttcccctaattgcttcctctaccatctgggagataaaattgttaccaaagtgtgcaactgcttatattctcttggctgaagaggaagcaacaaccattgctgaagcagaaaaattatttaagcaggccctgaaggctggagatggctgttaccgacgctctcagcagctacaacatcatggatcccagtatgaagcccaacatagacgagacaccaatgtcttggtgtacatcaaaagaaggctagcaatgtgtgccagaagactcgggaggaccagggaagcagtgaaaatgatgagagatttaatgaaggagttcccccttctgagtatgttcaatatccatgaaaaccttttagaagcccttctggaactacaagcatatgctgatgttcaggcagtcttagcaaagtatgatgatataagcttaccaaagtcagcaacaatatgctacacagctgctttgctcaaagcaagagctgtctctgacaaattctctcctgaggctgcatctcggcgggggctgagcacagcagagatgaatgcagtagaggccattcatagagctgtggaattcaatcctcatgtgccaaaatacctactagaaatgaaaagcttaatcctacccccagaacatatcctgaagagaggagacagtgaagcaatagcatatgcattctttcatcttgcacactggaagagagtggaaggggctttgaatcttttgcattgtacgtgggaaggcacttttcggatgatcccttatcccttggaaaaggggcacctattttatccttacccaatctgtacagaaacagcagaccgagagctgcttccatctttccatgaagtctcagtttacccaaagaaggagcttcccttctttattctctttactgctggattatgttccttcacagccatgctggccctcctgacacatcagttcccggaacttatgggggtcttcgcaaaagctatgattgacattttctgctcggcagagttcagggactggaattgcaagagtattttcatgcgtgttgaagatgaactggaaatccctccggcacctcaatctcaacatttccaaaactgaactcatcacccctcttcccccaccaccaaaactgctcctcctcctgtattcctgacctccgccatccaccccgttgctcaagccggaaactcggcagcccttccaaactcttccctctctcactccccacatcccatcgtctcggccttcacaatctgtcagttctaacctcctaagcaactaggccttcagtaaatgtgattcacctcttctttccctccttttcccaaagcatccctcttagtctaggtccttgttgtttcttgcctgaactcctgccatagtcttaactggtctccttgcttcctgtcttatcctccaccgtctttcttttatactgacacaagaatggtctttctgaattgcacatgtgagcatgtcacttccctgcttaaatttctccagtggattcccagggacttcaggatcaagtcctagttgttcagcatggcatccaagactctttatgatctggcccttgcttacctctcagccttagctctcccaactcttgcacagtcactgctcttcagccatagtggatcactcaccattcccagatgtaccaggctctcgcacacctctgcacctttgcacgtgctgtttgctgtgcgtggaatgcccttcactgtcaccaccctgctcatccactctactaatgcctcttcattcttttatactcagctttctttaaagttcttctaagctgagttaggtgtctgtcctttatgatcccgcagtattccatgaatacgtatattctcacatttattgtactgtattataattgttgaaaacttgtctgtcccatttagaatgtgagctccttgagagcagaacggtgtcttcattatctctgtatccccaaggctttgcacagtgccttgctcatagtaggttttcaataaatgattattaaataaataaaaaaaaaaaaaaaaaaaaaaaaaaaaaaaaaaaaaaaaaaaaaaaaaaaaaaaaaaaaaaaaaaaaaaaaa

SEQ ID NO: 28204 - DNA, 2642 bp, Homo Sapiens
actttcaaaatggcggagtgtggagcgagcggcagcgggagcagcggggacagtctggacaagagcatcacgctgccccccgacgagatcttccgcaacctggagaacgccaagcgcttcgccatcgacataggcgggtcgttaaccaagctggcctactattcaacggtacagcacaaagtcgccaaggtgcggtctttcgaccactccggaaaggacacagaacgtgaacatgagccgccctatgagatttcagttcaagaagagatcactgctcgactgcacttcattaagtttgagaatacctacatcgaagcctgcctggacttcatcaaagaccatctcgtcaacacagagaccaaggtcatccaggcgaccgggggcggggcctacaagttcaaggacctcatcgaagagaagctgcggctgaaagtcgacaaggaggacgtgatgacgtgcctgattaaggggtgcaacttcgtgctcaagaacatcccccatgaggccttcgtgtaccagaaggattccgaccctgagttccggttccagaccaaccacccccacattttcccctatcttcttgtcaatatcggctctggagtctccatcgtgaaggtggagacggaggacaggttcgagtgggtcggcggcagctccattggaggcggcaccttctgggggcttggcgctctgctcaccaaaacgaagaagtttgacgagctcctgcacctggcctcgaggggccagcacagcaatgtggacatgctggtgcgggacgtctacggcggcgcccaccagactctcgggctgagcgggaacctcatcgccagcagcttcgggaagtcggccaccgccgaccaagagttctccaaagaagacatggcgaagagcctgctgcacatgatcagcaacgacattgggcagctggcctgcctccacgcacggctgcacagcctggaccgcgtgtactttggaggcttctttatccggggccaccccgtgaccatgcgcaccatcacctatagcatcaacttcttctccaagggggaagtgcaggcgctgtttctgaggcacgaaggctacctgggagccatcggagcgttcctgaaaggagctgagcaggacaatcctaaccagtacagctggggagagaactatgcaggcagctccgggctgatgagtgcatcacccgagctcggcccggcgcagcgggcgcggagtggcacttttgacttgctggaaatggaccggctggagaggccactggttgacctgccgctcctcctggacccgccctcctacgtgcccgacacggtggacctcaccgatgacgctctggcccgaaaatactggctcacctgctttgaggaggccctggacggggtagtgaagcgcgcagtggcgagccagccagactctgtggatgcagccgagagggcggagaagttccggcagaagtactggaacaagcttcagaccctgaggcagcagcccttcgcctatgggaccctgaccgtgcgcagcctgctggacaccagggagcactgtctgaacgagttcaacttcccggatccctactccaaagtgaagcagcgggagaatggcgtggcgctgaggtgcttccccggggtcgtgcgctccctggacgcgctgggctgggaggaacggcagctggcgctggtgaaaggcctcctggcggggaatgtcttcgactggggggccaaagccgtgtctgctgtccttgaatccgacccctactttgggtttgaagaagcaaagaggaagttacaagaaagaccctggctcgtggattcctacagcgagtggcttcagagattaaaggggccccctcataaatgtgccttaattttcgcagataacagtggaatagacatcattttgggagtcttcccctttgtcagggagctactccttagagggacagaggtcatcctggcgtgcaactcaggccccgccctgaacgacgtgacccacagcgagtccctcatcgtggcagagcgtattgcgggcatggaccctgtcgtgcactctgcgctccaggaagagaggctgctgctggtgcagacgggctccagctccccgtgcctcgacctcagccgcctggataaggggctggccgcactggtgcgggagcgtggcgcggatctggtggtcatcgagggcatgggccgtgctgtccacacaaactaccacgcagccctgcgctgcgagagcctcaagctggccgtcatcaagaacgcgtggctggccgagcggctgggcggccggctcttcagcgtcatcttcaagtacgaggtcccagccgagtgaggcgctgcagctgccggactcttctgcttgtcacttgtcaggaatgtgtttttaccaccacagggaaactgcgttcaaatcaacgtatttatatggtactgctgtgacgcggcacatacaccccagccgcacagatgcgtgtgacccagaggcgagacgcagctttgtcctgggagacgttcatattggaatctatttaactgctaaagaaccttttatatatatatatatataaatagagagatctatacaggtatgtctgacgggacgcagcaccgtgggcacgcaccaaatagagtttttaaaagagg

SEQ ID NO: 28205 - DNA, 9021 bp, Homo Sapiens
atgggcaggaaccagcgcaaagcgccccagcgcctggagaggcccgggaggccggcctcaggggagcaggagtcggggtcggccagcgcggatggcgcgcccagccgggaacgccgttccgaccgcgggcaggcggccagggcgaaaccggcggccgagcctgccaccgccgggggccagggaacccctggtggccgcaggaagcccactgcagaggggaacggcggctgcagacgcccaggggctgggctgtccccgaaagcccaggagaggcaaagcaacgcgcagcgtcagggacgcgggcccaggggcggccgcggggggcgcctggaggagggaagcctctccggaggagaagagctgggcggccgccgtaggaggaagcggaaagataaggggccctcggctcggcggggccgccggacgcccaggagcctcaatggggacacgtcgggtggggacggaggcagctcctgtccggacagcgaaacccgcgaggcccaggagagcggcagccagcgcggcacagcccgggagctgcggcccacgccggagcctacggacatgggctcggaagggacaaaaaccgggccggagtcagcgctggagccaagcagcgacggcctggacagcgactggccccacgcagatacccggggccgggaagggtcgtcggggacggggcccctgggagccagcgagcattccggcggggactccgactcgagtccgctggggaccggacctggacggggctctcgggcagctatggcctccaggaccttcgaggacagctcgcgggctcctcgggacactgggccggccaaggacgcgagcgacaaccgggcgcagcggggcgccgagccagaaacaatgcaggcctcgacggcccgggctccgcgccaccaggtcggaaaggcggtggggcaggtgccagcggcggcaggcgagggcgaagcgggagccgcagcaggagcggggccggaggacccagccccgctggcggccctcctggtggtccgcaggctcctcgcgaggcccccgccaggcgccgcttcccaggccgtgggcccccgccgcgctggcctcaaggagcggctcctgagtgtagcgcgagccctgggcctcctgcgctggctgcggcggcggctgcggctgcggcggcggccgccagagggcgaggggcagggtaccgggccacgggcgagcgaggggtggggccgccggaaaccggacgaggggcggggtcatgggagaggaagcaaggggcggggccgcgggaaagcggatgaagggcggggccacgagcgaggggacgagggtcggggccgcgggaaagcggacgaagggcggggccacgagcgagggtacgaggggcggggctgcgggaaagcggacgaggggcggggtcacgagagaggtgacgagggccgggaccaccagagagggtacgaggggtggggccgtgagcccgggctgcggcaccgtctagcgttgcgcctggctggcttagcagggctggggggtatgccgagggcttcccctggtggccgctccccgcaggtcccgacaagcccagtccccggcgacccttttgatcaggaggacgagactccagatcccaagttcgcggtcgtgttccccaggatccacagggcagggcgggcgtcgagcagccgcagctctgaagaagcgtccgcagatgcccccacgggggaaggccgaggttggcctcgtgcaggggtgggggggcacagtgaggggtgcaggacgagtggggaaggggtgtccgggcttcgtcgcggctccctccttgccccgactgcacccgacgggccttccctcgacgagagcggctccagcagtgaggcggagttggagaccctcaatgacgagcccccggtgcgctgggcgcagggctcaggcccccacgagggtcctaggcttggcgccgccgtgctgctaccccgactctccttggagacccgcctgcagcaggagggagacccgggcctccgtgggtccctgagggagctgtgggaaccggaggatgaggacgaggcggtgctggagagggacctggagctgagcctccggccgggcctggaggcgccacccttccccggtgccaagggcaggagcctcggagacggcctggaagacatggaggacctggcgcggttgcgacacatctttgccatcgtggcatcagcctatgacctggctcagaatactgggcaggacccatgcatcctcctgtgtgggcacagtggctcagggaagacggaagccgccaaaaagatcatgcagttcctaagcagcctggagcaggatcagacggggaaccgagagtgtcaggtggaggatgtgctgcctatactcagcagctttggccatgccaagaccatcctcaatgccaatgccagccgcttcggccaggtcttctgcctctacctacagcaaggggtcatcgtgggagcctctgtgtctcattatctacttgagacctccagggtggtgtttcaggcccaggctgagcggagcttccatgttttttacgagctgctggcagggctggactccatagagcgggagcggctctccctgcagggaccggagacttactactacctcaaccagggccaggcctgcaggctgcaaggcaaggaggatgcccaggactttgaggggctgctgaaggcactgcaggggctcggcttgtgcccagaggagttgaatgccgtctgggctgtgctggccgccatcctgcagctgggcaacatctgcttctcctcctcagagcgagagtcccaggaggtggctgctgtgtctagctgggctgagatccacacagcagcccgactgctgcgggtaccaccagagtgcctggagggggctgtcaccaggagggtcacggagacgccctatggccaggtctcgcgatccctgcccgtggaaagtgccgttgatgccagggacgccctggccaaggcactgtattcccgcctcttccaccggcttctgaggagaaccaatgcacggctggcaccaccaggggagggaggcagcattggcaccgtcactgtcgtggatgcctacggctttgaggccctgcgggtgaatggcctggagcaactgtgcaacaacctcgccagcgagcgcctacagctcttctccagccagatgctgctggcccaggaggagcctccgagggagtcctgcctagacctcctggtagatcagccccacagcctcctgagtatcctggacgcccagacatggctgtcccaggccacggaccacaccttcctccagaagagccactatcaccatggtgaccaccccagctatgccaagccccggctgcccctgcccgtgttcaccgtgcgacattatgcagggactgtcacctaccaggttcacaagtttttaaacagaaaccgggatcagctggaccctgctgtggtggagatgcttggccagagccagctccagctggtgggcagcctgttccaggaggcagagccccagtccaggggagggcgaggcagacccacgctggcctctcgcttccagcaggccctggaggacctcatagcccggctggcgaggagccatgtctatttcatccagtgcctcacccctaaccctggaaagcttccaggcctctttgacgtgggacatgtgacagagcaactgcaccaggcagccatactggaggccgtgggcacccgcagtgccaacttccccgtgcgtgtgccctttgaggccttcctggccagcttccaggccctggggtcagaagggcaggaagacctctctgaccgggagaagtgtggtgccgtcctgagccaggtgctgggggccgaatcacctctctatcaccttggagccaccaaggtcctgctgcaggagcagggctggcagcggctggaggagctccgggaccagcagcgctcccaggccctggtcgacctgcaccgcagcttccacacctgcatctcccgccagcgcgtcctgccccggatgcaggctcgcatgcgtgggttccaggccaggtctgcaggcgttggagccagggctgaagtgggtgggcctgtcttcacacattcctccaacagctgttggctgaccgtctgcctcatctacccttgggccagatgctggaagcggtacctccggcggcgggcagctttgggacagctgaacaccatcctgctggtggcccagcccctgctccagaggcggcagagactgcaggagctggggcgcttggagatcccggctgagctggccgtcatgctgaagacggcggaaagccatcgggacgccctggctgggagcatcaccgagtgcctgccgcctgaggttcctgcccggcccagcctgactctcccagcagacattgacctgttccctttctccagcttcgtcgccatcggctttcaggccagggcagccactgcgaagcccctaacccagctggatggagacaaccctcagcgtgccctggacatcaacaaagtgatgctgcggctcctgggggacggatccctggagtcctggcagaggcagatcatgggcgcatacctggtgcggcaggggcagtgccggccagggctgcggaatgagctctttagccagctggtggcccagctatggcagaacccagatgaacagcagagccagcgtggctgggccctcatggctgttttgctcagcgcctttcccccactgcctgtcctacagaagccactgctcaagttcgtgtctgaccaggcccccaggggcatggcagcgctgtgccagcacaagctgctgggggccttggagcagtcgcagctggcctcgggggcactcgggcccaccccccgacccagctggagtggctggccggatgcgcggggcatggcgctggatgtgttcaccttcagcgaggagtgctactcggccgaggtggagtcttggaccaccggggagcagctggctgggtggatcctgcagagcagggacgcatggcaggacttggctggctgcgactttgtgctggacctgatcagccagactgaggacctgggggacccagctcgcccccgcagctaccccatcactcctcttggctcagccgaggccattccccttgcccctggcattcaggccccctcactgcccccaggaccccctccaggtccagccccaacgctgcccagcagggaccacacaggggaggtccagaggtcagggagcctggacggcttcctggaccagatcttccagccagtgatatcctccggcctcagcgatctggaacaaagctgggctctgagcagccgcatgaagggagggggcgccattgggcccacacagcagggctaccccatggtgtacccaggaatgattcagatgcctgcataccagccaggcatggtccctgcacccatgcccatgatgccagcaatgggcacagtccctgccatgccagccatggtggtgccgccgcagccaccgcttcccagcctggatgcagggcagctggccgtccagcagcagaactttatccagcagcaggcgctaatcctggcccagcagatgacagcccaggccatgtccctgtccctggagcagcagatgcagcagcggcagcagcaggctcgggcctccgaggctgcgtcccaggcctcaccctcagccgtcacctccaagcccaggaagccccccacacccccggagaagccacagcgtgacctgggatcagagggtggctgcctgagggagacctccgaggaggctgaagacaggccctatcagcccaagagcttccagcagaaacggaactatttccagaggatggggcagccacagatcacagtgaggacgatgaagcccccggccaaggtccacatcccccaggggagagcgcaggaggaggaggaggaggaggaggaggaggaggagcaggaggagcaagaagtggaaacaagagcagtgccgtcccctcctcctccccccatcgtgaagaagccattgaagcaaggtggggccaaagctccaaaagaggctgaggctgagccagccaaggagacagcggccaaggccatggccaagggcagcccaaggcagggggactgtgactccaagcccaagcggccacaacccagcagggaaattggcaacatcatccgcatgtaccagagccgcccgggccccgtgcctgtgcccgtgcagccatccaggcctcccaaagctttcctgaggaaaatcgaccccaaggacgaggctctggccaagctgggtatcaacggtgcccactcgtccccgccgatgctgtcccccagcccaggaaagggccccccgccagctgtggctcctcgacccaaggccccgctacagcttgggccctctagctccatcaaggaaaagcaggggccccttctggacctgtttggccagaagctgcctattgcccacacacccccacctccaccagcgccaccactgcctctgcccgaggacccagggaccctttcagcagagcgtcgttgcttgacacagcccgtggaggaccagggggtctccacccagctactcgcgccctctggcagcgtgtgcttctcctacaccggcacgccctggaagttgttcctacgcaaggaggtgttctacccacgggagaacttcagccatccctactacctgaggctcctctgtgagcagatcctacgggacaccttctccgagtcctgtatccggatttcccagaatgagcggcggaaaatgaaagacctgctgggaggcttggaggtggacctggattctctcaccaccaccgaagacagcgtcaagaagcgcatcgtggtggccgctcgggacaactgggccaattacttctcccgcttctttcctgtctcgggcgagagtggcagcgacgtgcagctgttagccgtgtcccaccgtgcgctagcccacgaccctgggctagaggtgggggcaggtggcaaggtgacctcagttcatgcccgatccctgcgcagctttgcggaggtgctgggtgtggagtgccggggcggctccaccctggagctgtcactgaagagcgagcagctggtgctgcacacagcccgggcaagggccatcgaggcgctggttgagctattcctgaatgagcttaagaaggactccggctatgtcatcgccctgcgcagctacatcactgacaactgcagcctcctcagcttccaccgtggggacctcatcaagctgctgccggtggccaccctggagccaggctggcagtttggctctgccgggggccgttccggactctttcctgccgacatagtgcagccggctgccgctcccgacttttccttctccaaggagcagaggagtggctggcacaagggtcagctgtccaacggggaaccagggctggctcggtgggacagggcctcagagcgccctgcccacccttggagccaggcacacagtgacgactcggaggccaccagcctgtcctctgtggcctatgcctttctgcccgactcccacagctacaccatgcaggaattcgcccggcgttacttccggaggtcccaggccttgctgggccagactgatggaggtgccgcaggaaaggacacggacagcctggtgcagtacaccaaggctcccatccaggagtcgctcctcagcctcagtgatgatgtgagcaagctggctgtagccagcttcctggccctgatgcggtttatgggtgaccagtccaagccccggggcaaggatgagatggatctgctctatgaactgctgaagctgtgccagcaggagaagctgagggatgagatttactgccaggttatcaagcaggtcacgggacacccccggccggaacactgcactcgaggctggagcttcctcagccttctcacaggcttcttccccccgtcgaccaggctgatgccctacctgaccaagtttctgcaggattcaggccccagccaagagctggcccggagcagccaggagcacctccagcgcacagtcaaatatggggggcgccggcggatgcccccaccgggtgaaatgaaggctttcctggtagcagcagaagtgcaggaggagctgtgccggcaaatgggtatcacggagcctcaggaagtgcaggaattcgccctcttcctcatcaaagagaagagccagctggtgcggcccctgcagcccgccgaatacctcaacagcgtggtagtggaccaggacgtgagcctgcacagccggcggctccactgggagaccccactgcacttcgataactccacctacatcagcacccactacagccaggtgctgtgggactaccttcaggggaagctgccagtcagcgccaaggcagacgcgcagctcgccaggctggccgccctgcagcacctcagcaaggccaacaggaataccccctcagggcaggacctgctagcttacgtgccaaagcagctgcaacggcaggtgaacacggcctccatcaagaacctgatgggtcaggagctgagacggctggaaggacacagcccccaggaagcacagatcagcttcattgctgacctgggggaccaagcagagcaggttccagggccccagcagtcagatttcctgcctgcaccctctccacccgcagaggccatgagccagctgcccctcttcggctacaccgtctatggggtgctgcgagtgagcatgcaggccctgtccggacccactctcctggggctcaaccgccagcatctcatcctcatggaccccagctcccagagcctgtactgccgcattgccctgaagagcctgcagcggctccacctgctaagccctctggaggagaaggggccccctggcctggaagtcaactatggctcagctgacaacccccagaccatctggtttgagctgccacaggcccaggagctgctatacaccactgtcttcctgatagacagcagtgcctcttgcactgagtggcccagcatcaactga

SEQ ID NO: 28206 - DNA, 5515 bp, Homo Sapiens
gccctgccctcacctggctatcccacacaggtgagaataaccagaactcacctccggtaccagtgttcacttggaaacatggctctcagcctctggcccctgctgctgctgctgctgctgctgctgctgctgtcctttgcagtgactctggcccctactgggcctcattccctggaccctggtctctccttcctgaagtcattgctctccactctggaccaggctccccagggctccctgagccgctcacggttctttacattcctggccaacatttcttcttcctttgagcctgggagaatgggggaaggaccagtaggagagcccccacctctccagccgcctgctctgcggctccatgattttctagtgacactgagaggtagccccgactgggagccaatgctagggctgctaggggatatgctggcactgctgggacaggagcagactccccgagatttcctggtgcaccaggcaggggtgctgggtggacttgtggaggtgctgctgggagccttagttcctgggggcccccctaccccaactcggcccccatgcacccgtgatgggccgtctgactgtgtcctggctgctgactggttgccttctctgctgctgttgttagagggcacacgctggcaagctctggtgcaggtgcagcccagtgtggaccccaccaatgccacaggcctcgatgggagggaggcagctcctcactttttgcagggtctgttgggtttgcttaccccaacaggggagctaggctccaaggaggctctttggggcggtctgctacgcacagtgggggcccccctctatgctgcctttcaggaggggctgctccgtgtcactcactccctgcaggatgaggtcttctccattttggggcagccagagcctgataccaatgggcagtgccagggaggtaaccttcaacagctgctcttatggggcgtccggcacaacctttcctgggatgtccaggcgctgggctttctgtctggatcaccacccccaccccctgccctccttcactgcctgagcacgggcgtgcctctgcccagagcttctcagccgtcagcccacatcagcccacgccaacggcgagccatcactgtggaggccctctgtgagaaccacttaggcccagcaccaccctacagcatttccaacttctccatccacttgctctgccagcacaccaagcctgccactccacagccccatcccagcaccactgccatctgccagacagctgtgtggtatgcagtgtcctgggcaccaggtgcccaaggctggctacaggcctgccacgaccagtttcctgatgagtttttggatgcgatctgcagtaacctctccttttcagccctgtctggctccaaccgccgcctggtgaagcggctctgtgctggcctgctcccaccccctaccagctgccctgaaggcctgccccctgttcccctcaccccagacatcttttggggctgcttcttggagaatgagactctgtgggctgagcgactgtgtggggaggcaagtctacaggctgtgccccccagcaaccaggcttgggtccagcatgtgtgccagggccccaccccagatgtcactgcctccccaccatgccacattggaccctgtggggaacgctgcccggatgggggcagcttcctggtgatggtctgtgccaatgacaccatgtatgaggtcctggtgcccttctggccttggctagcaggccaatgcaggataagtcgtgggggcaatgacacttgcttcctagaagggctgctgggcccccttctgccctctctgccaccactgggaccatccccactctgtctgacccctggccccttcctccttggcatgctatcccagttgccacgctgtcagtcctctgtcccagctcttgctcaccccacacgcctacactatctcctccgcctgctgaccttcctcttgggtccaggggctgggggcgctgaggcccaggggatgctgggtcgggccctactgctctccagtctcccagacaactgctccttctgggatgcctttcgcccagagggccggcgcagtgtgctacggacgattggggaatacctggaacaagatgaggagcagccaaccccatcaggctttgaacccactgtcaaccccagctctggtataagcaagatggagctgctggcctgctttagtcctgtgctgtgggatctgctccagagggaaaagagtgtttgggccctgcagattctagtgcaggcgtacctgcatatgcccccagaaaacctccagcagctggtgctttcagcagagagggaggctgcacagggcttcctgacactcatgctgcaggggaagctgcaggggaagctgcaggtaccaccatccgaggagcaggccctgggtcgcctgacagccctgctgctccagcggtacccacgcctcacctcccagctcttcattgacctgtcaccactcatccctttcttggctgtctctgacctgatgcgcttcccaccatccctgttagccaacgacagtgtcctggctgccatccgggattacagcccaggaatgaggcctgaacagaaggaggctctggcaaagcgactgctggcccctgaactgtttggggaagtgcctgcctggccccaggagctgctgtgggcagtgctgcccctgctcccccacctccctctggagaactttttgcagctcagccctcaccagatccaggccctggaggatagctggccagcagcaggtctggggccagggcatgcccgccatgtgctgcgcagcctggtaaaccagagtgtccaggatggtgaggagcaggtacgcaggcttgggcccctcgcctgtttcctgagccctgaggagctgcagagcctagtgcccctgagtgatccaacggggccagtagaacgggggctgctggaatgtgcagccaatgggaccctcagcccagaaggacgggtggcatatgaacttctgggtgtgttgcgctcatctggaggagcggtgctgagcccccgggagctgcgggtctgggcccctctcttctctcagctgggcctccgcttccttcaggagctgtcagagccccagcttagagccatgcttcctgtcctgcagggaactagtgttacacctgctcaggctgtcctgctgcttggacggctccttcctaggcacgatctatccctggaggaactctgctccttgcaccttctgctaccaggcctcagcccccagacactccaggccatccctaggcgagtcctggtcggggcttgttcctgcctggcccctgaactgtcacgcctctcagcctgccagaccgcagcactgctgcagacctttcgggttaaagatggtgttaaaaatatgggtacaacaggtgctggtccagctgtgtgtatccctggtcagcctattcccaccacctggccagactgcctgcttcccctgctcccattaaagctgctacaactggattccttggctcttctggcaaatcgaagacgctactgggagctgccctggtctgagcagcaggcacagtttctctggaagaagatgcaagtacccaccaaccttaccctcaggaatctgcaggctctgggcaccctggcaggaggcatgtcctgtgagtttctgcagcagatcaactccatggtagacttccttgaagtggtgcacatgatctatcagctgcccactagagttcgagggagcctgagggcctgtatctgggcagagctacagcggaggatggcaatgccagaaccagaatggacaactgtagggccagaactgaacgggctggatagcaagctactcctggacttaccgatccagttgatggacagactatccaatgaatccattatgttggtggtggagctggtgcaaagagctccagagcagctgctggcactgacccccctccaccaggcagccctggcagagagggcactacaaaacctggctccaaaggagactccagtctcaggggaagtgctggagaccttaggccctttggttggattcctggggacagagagcacacgacagatccccctacagatcctgctgtcccatctcagtcagctgcaaggcttctgcctaggagagacatttgccacagagctgggatggctgctattgcaggagtctgttcttgggaaaccagagttgtggagccaggatgaagtagagcaagctggacgcctagtattcactctgtctactgaggcaatttccttgatccccagggaggccttgggtccagagaccctggagcggcttctagaaaagcagcagagctgggagcagagcagagttggacagctgtgtagggagccacagcttgctgccaagaaagcagccctggtagcaggggtggtgcgaccagctgctgaggatcttccagaacctgtgccaaattgtgcagatgtacgagggacattcccagcagcctggtctgcaacccagattgcagagatggagctctcagactttgaggactgcctgacattatttgcaggagacccaggacttgggcctgaggaactgcgggcagccatgggcaaagcaaaacagttgtggggtcccccccggggatttcgtcctgagcagatcctgcagcttggtaggctcttaataggtctaggagatcgggaactacaggagctgatcctagtggactggggagtgctgagcaccctggggcagatagatggctggagcaccactcagctccgcattgtggtctccagtttcctacggcagagtggtcggcatgtgagccacctggacttcgttcatctgacagcgctgggttatactctctgtggactgcggccagaggagctccagcacatcagcagttgggagttcagccaagcagctctcttcctcggcaccctgcatctccagtgctctgaggaacaactggaggttctggcccacctacttgtactgcctggtgggtttggcccaatcagtaactgggggcctgagatcttcactgaaattggcaccatagcagctgggatcccagacctggctctttcagcactgctgcggggacagatccagggcgttactcctcttgccatttctgtcatccctcctcctaaatttgctgtggtgtttagtcccatccaactatctagtctcaccagtgctcaggctgtggctgtcactcctgagcaaatggcctttctgagtcctgagcagcgacgagcagttgcatgggcccaacatgagggaaaggagagcccagaacagcaaggtcgaagtacagcctggggcctccaggactggtcacgaccttcctggtccctggtattgactatcagcttccttggccacctgctatgagcctgtctctacagtagaaggagattgtggggagagaaatcttaagtcataatgaataaagtgcaaacagaagtgcatcctgattattttcagaagctgatgaggaata

SEQ ID NO: 28207 - DNA, 1528 bp, Homo Sapiens
caagaccaagtcgtaatagcaacttcccttcctcagctgcctgaactttttttttcccttgtagctggagagaagtgtcacattttgctcactctcaaccttcctcgcccacccccttcccggagaacctgtgcggtgtgtagagggtgctgtgagccacctccagcctcgggtggctgcttaagtaactttcaactcctctcttcttaacactatgaagtgtctcgggaagcgcaggggccaggcagctgctttcctgcctctttgctggctctttttgaagattctgcaaccggggcacagccacctttataacaaccgctatgctggtgataaagtgataagatttattcccaaaacagaagaggaagcatatgcactgaagaaaatatcctatcaacttaaggtggacctgtggcagcccagcagtatctcctatgtatcagagggaacagttactgatgtccatatcccccaaaatggttcccgagccctgttagccttcttacaggaagccaacatccagtacaaggtcctcatagaagatcttcagaaaacactggagaagggaagcagcttgcacacccagagaaaccgaagatccctctctggatataattatgaagtttatcactccttagaagaaattcaaaattggatgcatcatctgaataaaactcactcaggcctcattcacatgttctctattggaagatcatatgagggaagatctctttttattttaaagctgggcagacgatcacgactcaaaagagctgtttggatagactgtggtattcatgcaagagaatggattggtcctgccttttgtcagtggtttgtaaaagaagctcttctaacatataagagtgacccagccatgagaaaaatgttgaatcatctatatttctatatcatgcctgtgtttaacgtcgatggataccattttagttggaccaatgatcgattttggagaaaaacaaggtcaaggaactcaaggtttcgctgccgtggagtggatgccaatagaaactggaaagtgaagtggtgtgatgaaggagcttctatgcacccttgtgatgacacatactgtggcccttttccagaatctgagccggaagtgaaggctgtagctaacttccttcgaaaacacagaaagcacattagggcttatctctcctttcatgcatatgctcagatgttactgtatccctattcttacaaatatgcaacaattcccaattttagatgtgtggaatctgcagcttataaagctgtgaatgcacttcagtcagtatacggggtacgatacagatatggaccagcctccacaacgttgtatgtgagctctggtagctcaatggattgggcctacaaaaatggaataccttatgcatttgctttcgaactacgtgacactggatattttggatttttactcccagagatgctcatcaaacccacctgtacagaaactatgctggctgtgaaaaatatcacaatgcacctgctaaagaaatgtccctga

SEQ ID NO: 28208 - DNA, 1421559 bp, Homo Sapiens
  misc_feature (414394)..(414394): n is a, c, g, or t
  misc_feature (836909)..(836909): n is a, c, g, or t
  misc_feature (1022504)..(1022504): n is a, c, g, or t
  misc_feature (1041105)..(1041105): n is a, c, g, or t
  misc_feature (1122667)..(1122667): n is a, c, g, or t
caagcactttataccactttttataaaataagccctcactttcattacattatttaactygtatttctgccttgtgttatagatagaaagtatattattatttctactttatagctgaagaaactgagtccaaaatgggtagagcaactggcactaaagatcacctagccagtccgagwtcacacagtcagtattaggactggggccttgtgccttccagtgcagggtcccttacaccagtcatgacatagatgcccagatcatgcatgacttgatgtaaaaacaacaatttttgttgtcccagtttgagtccttataaatttcccctgtcaaagaaataaacatgcaactctcagaaattatcttttatggagcttttaaaggccactttgccaargggagctatatarccatgacataaacatgaagatggattgacagaaaatactctttcacaggctggaggaaatattgggggaaagaaattttctcagactgcccttccaacgtggcatggatcatggaggtcagcttttctagcttgtgcccagaggtctgtctacctcagctgtgtcttgtgattgataggaggatacagtctcccagggtgtgatttaaggtggagcttataggtctacaaagctcaagctctwatcaagctactatggcatgatagtacaattataaagaaagtagactagtttctataagctgtgtataaaaccaggcccaccctaacatttgcagggcctaggccaagagtgtatgtagagtctcatataccgtatgtctaaatatttcaaagttataaaccaagaagggcctgtggcccaaactgtgttcccaccctaagcctggtagaggcttctcacaggtgtccttgggagtccctccaggaccagccctgctgcttgccagtctgcatggtcacctggatgtgctgagtcaaaggcaggtggagctgggtgaaagtctgtggttttcagtgaggactggagattctcaaatctgggattgggaactgactcagtcaagcgcctcaaggagctagggtgctccttgagcaggttcctctcctccttatttcaatttgctgattaagaacttctagacagttctaagcccctttcaaacaacacacgtttttagcaaatgagaagaagaaagcttggtcatgttagaaatagtcctgtccagacacacacttcagagcaatctggaatggccattccccaagcatgggctgcaattcctttctcccctgtgtctccctaacgcccacacccactcatcagctcttagttcagcacactggcctgtgggtccgagtttggtgtgtgccgcatccctctcctataaactctttttgctcaataaattactgaatcttcaaaagaaaaatttttaaataagaccaaaaccacaaaacaaagcaaacaacagtgacctggtattttggcattcattttgtgtggggccctctaaagcagagggtcctggaggagtctcttcagtccaatggctgaattactccaagactctttcatacaaaagttagctgggcatggtggcatgcgcctgtagtcccagctacttgggagactgaggcgggagaatcacttgaacctgggaggcggaggttgcagtgagccaagattgtgtcattgccctytagcctgggtgacagagcaagactccatctcaaaaaacaaaacaaaacaaaacaaaaaaaactctttctttactttataaccatatggcaggacatctcagttcatctatgacctgtggttttaaagtaaattctgtttaaagttatctttaaaatagctttatttttgttaaaatagagccatatcttcatctgcgggaaatcatattgactccatgataagctatattctggaaaatagtcagtgtgctgacgattgctacctgtgagtagctcacccaacccayaggcaaagtagcaaagagagaggcatggcaacccccaacgtgagaggcttgtagacaacccacagttctagcagatgtcagtgcaacggggcaaatttcatccccctcagagcatggctctgggcaccactggacacatctgtttcaggataatttgaagtccagttgttcagacagagttgatcttaagaccatggtggctactgctgaattttttcagataaagttagtaaaatccgaagttcacccaggtggttgatggcaatatgaactctatataatactgtctgatgccaagtatcttagtcaactcaggctgccataacagaataccacagaccaggtggtttaaacagcagatatttacctttcacagctctggaaactgggaagtctgggattaagctgccagcatggtcaggttctggtgaggggtcacctcttggcttgcaggtgtccaccttcttgccgtgtgctgtgtgtggtggagagatctctccttacragggccctgattccatcatgagcccatctaaccatgattacctcccagaagccccacctccaaataccatcccattgggggttagggtttcaacatatgaattttgagaggacacagacattcagtccataacaccaaatctgtattcatcctagttcagcacagagcagaacctatgtttacccaatatcctttgaatactagttctgaccatagcctttgtaatttaaaagctctacagtcattttttttgaattataaatgcaatacacacttttactagaaaataggaaaaaattaaataaaacttatccataattccaccaatttgagactaacagttggtttcttttcttccaaacacatatgtgtatataaatatacgcatatatacttccataaacaacatatttttaaaatgaaattagattcatactgttgaggttttttttttttttttaatcttacttctttcaacatgctttaaatagtaagcttttcccttgtcctaaaaaaatttttacttcttcactttttaatgttttggctgtctggaccataaattatctgcatttatatcttatattatttagaaaatatatatctgcttttaatcccctcgtttttaacttttaatttttcaaatggattttaaaagctgtgtttttgctaagtatcaactcaagaaggaaatgttctcttttgagttctacctttgctagatgaagaatgtggcccacctctcctctcactaccccttcatgtcaaagccttggatttgtggggctttggatgttgtgcttattttttgaaataaaaataaatgaacaatttcctatatatagaaaattattatgcatataaaccatgcatttttatcacaaaggattttagttggcagttttctgcaatatactagttattttcacaaggtggaaatccagaggattgattgacttgaatcctgaatccctacatcctctatcagcacccagtgttcttgcaggttttcaaagaaactctccctgctattaggctaaggctttagattcaaatactcatagagaatcttagccctaggctaaaaatagggcccacctttagcatgggccgtattttgttccttcttccatggatatgtctggagcagtcttctttagttctgattcctggccaacatcatagaaagatgaatcctttaggaagtgcaccaaagaaggagcacttttgcataatgactagagctcctcatctctgccaaccaccccaagtctctctctctttttattttttatttttttgctgggcccaaccccttgtttctgtttgagcaaaatgcataaacttagaacagacattcttaagccttgtgctgtgttacactgttgtactacgagcatttgacttatttttgctggaaccatgaatatgtcttgaaaggctgctgtctgctggatgaaacactgagctaagcaggtcatacaacaggctgtagagtaggagctccaacttggaactaaggggcataaagtgtggtaccctgcccactggtgtcaaagaaaaattaagcattcaaaggaacatgtgagggctttgctttctgacagtgtggttctggctatactgagggttatcttttaaaactagcatggtatagaagagtgacctcatggacagtgcagtaactagatgcttccaaagggtgtgagatgctgcttttctctagtagtatttgtgttataattattcctggcttgtttgcctttagtatttttttgactgccaaaaattatagcattcaaaaaatgtgccacaaaaacaacaaagttgacaactactgatctggaacctttctaaatgtgaccagtcagagaccatagccaatattttctattgtctatagaatgggatgggcagagaaaacagctaacaaaaaaggaaaaaacaacccaaaatatttcatggtttcagctttattagcmtaacagtcaagttgttytggttccacgacttttaaattaagcgaaggagaactctcccatcaataggttcattgtgatgccaaactttacatattttggaaaaacattcatttacccgccaggcaagctgcctsctctcttagagttcgtggtagggaactataagcataaagacctttctgaggaggttttccttattttattgactgcctcatatatttacaacttcccaatttattttttcagactgctaactcctgtgttcctagattcccatttttcaattgattgtgggctttttctagggttacagatttaacttccatgcaagtggtggggtgtcccacatcaggaccttgtatattctaactctaaacactcttcgtatttctgtatgtctccagaccagcaaacttacacagtcttcttgttattgatatttgccttttgtgtgttccaagagcatatccctaagtgcacagaagatgtgatttttcttctgtcattgtctccaaaacctcttctttcctgcatctgaagtccccagaccctggataagatttctactttgttgcactgaggaacagaacttttccctttttatttacagaagggtctggctcttatcacctctgaatagcatgccattctcttagcctcatctaagaaacagactgtaggggaagagaagatctagaatgttggtcaccaaccaatggcagacattatcaggtaagaaacctgcccacccaaactctggaccctaatatgcaagtctaactagttccataaaaccaatccctgctaaccccacaaacaggttgcctatagccttacaagtggcctccttggtttttagtggcatagtgcaggtgagccatatattatgcttctcaatttatttccattggtcagaaaactggtaaaaaattccttttcaatggtatagttttcgaatctcaacagagacttctttggtcttagtgatgagtcttcatggtattttggcttgcaygtagtaacaataatcaagtcattcacccagtgcaagattttggtgtctttatttttaactatttgtattgtgcattatcacatagataaccatttgttttgctggtctcattgctcacgtagaagtctgaatataattctttctcagagtgtgggaaatcatggattgatattcttagtttttgatgtagtgctttttatttttaaccttcttagacaatttgtgagcaaggaagtcaggaactgtgagccacctgccatcttaatttgacatctagtctcactactttcaagcacctccacttcaaaatactcttacaagtgaatcaccattgttaaatggatctttgaaggaattttgacaaccagactgaaaacaatctagacatcttagatatttgtggcttcacagaaaataaaataaaacaacccwtttcagcatcaagttatattttccatagctacagaatctggtaaataactatgttactcattcatctaggtagtttgatactacctactgatactggagttggggagggaagtgctgggaagggaagggtgtggtccctggctagggctccacccctgggcctgtgcccatgaacctaggtgaggacaggcatttctgtttttgtgcccaaatgttgcatttcccaagaccaacctggcctaccacacccctctcctgtgcctataaaaactcccaataccctagctagcaagcacacagcaactggatgtcgagaggaacacaccagcagaataagatacaagtggctgggcattgaggggaatgctctggcgtaagagcacatcaacagatgccggcaggccagcaggctattgaccagcaggacgaggtgaagtttggctggggcagtcgaaggagagagctccactgctgagtggccgactccaggggaaaaccaccttcccactccatctcccttctggctcccccatctgctgagagctacttccgctcgctaaaatctttgcactcattctccaagcccatgtgtgatctgattctgctggtataccaaggcaagaaccctgggatacagaaagccctctgtccttgcgataaggcaaagggtctaattgagctgactaatgcaagccgcctacagrgagctaaactgaaagagcacactgtaacacatgcccactggggcttcaggagctgtaaacattcrcccctagacactgctgtggggttggagccccacagcctgcccgtctgcatgctcccccttgaggtttgagcagcggggcaccagagaagtgagccactctccctgtggcacaccctgtgaggggsacaagggaacttttcccattttactaccaaggccagtgacatgaatgatcaaatacyaaccagctacattttatttaatttttaatttttttagttgtcagaagattttattaactgtaagccagggaatggactgatcgattttattatgcaaatcaatgaaaaaaaaaaactcttttagaaggacacaaacacacacacgtgctcacagggaagctggttgttggttgagagtcaggtcagaaccttggagagctcaagataaagcgggggcagaaccacaatcagaagcttccatggctgccccccacatggatgagttttatttaattatttttttccttcaacttttattataagctcaggggtacatatgcaggatgtgcaggtttgtgacataggtaaacctgtgccatggcggtttgctgtacagatcttcctgtcacctaggtattaaacccagcacccattaactattcttcctgatgctctcaaccagctacattttaaaccctattttctctaaagatacatcaacagattagcttattcttcagtcctggatctaacataatttgtacagtaaagtgaagataaagtttattcagattatttgtacaagtactttctcatcaaagtgcagcagtctactttctgtttcccatgggtgataggagatagggttaaygaaacagcagtaatttagagaccagttttagctgcatattgcartctttctttagaactatcctaaaagctgtctgttgctttgaaatgaatcttacttccatttcctccttttcttttggacctgctcaggagcaataaaatagagcaaatgtaaacagcagaaatgagacagaaggggacttggagataaaagaaatttgtttcttctgcattcttcagaatgcagagtagttcctggcagagagtagatgctaagttaatgtttgtcaaattaagtgcataacccgaatattcagaatagaaatctaaatagtttttacttgcctgaacacaggaaccttactcctagaaaatttggctggctagcagaaacaactttaagtgccttgaaaaaataagtaacagatgataggttgcttctaactggaggctggtggaagacaacatcacattaggtctaggggaggattattacttgggaaggtgggcttgagtcagtgatgggttgagaggatgcggtagtaaccaaacaggtcagccaagccagcagccatcagggatggagccaaggcaaacttcaagcagacaatgctgaatacaaaccatgtctaccttctcagattgcctcccacccacctttctctttacatattggtgtaatagctatgctgattagcctgtctccttctggatgtgggtgaaaggccacattctggagtttaggacctgctttttcaagtggtactcaggggattaaatgacacaatccagaagtgtgtgtgaggagtgattagctccctgcatgtaaaacttgataaaagaaaaatgaaagacaggagtcctcgcttccttctttctttcaaggactactccaaggtgagatttcatttgcacattttcttaagaagtcctgagagctgggcagacatggttgcatcctggcccttgtgttgcttctttctcctctcaccctcattcttctagcctttcatttcccaactaaagggtcaaccctttcattctttcttcaggctctgctttctaagaaatcaggagtaaggtactgactaccccagagctgtctcacttggagctctttccctcaagcttttctgtttagtgtttttgtttgccatccaaggacataaaaagagaaggatccttcctcaaaaaccatgccctcagtctcctatgttactcctttttttggtgctgtgtaatagttatttyacaccataataaatattagctatacttgccattgtataggtgtaggggaggatgaggaggttcaaactgtattcccaacatcataacttcctgttacatccaagagctgttgaacaatatcgagtttcccaacrtatgtgtgattggaatcaaaggaggagaagaaagggagacagttcagaagataatatctgtggaaataatggctgggaattttcaaaaaataatgacagaaaccaaaccacagatccaggagtctcagagaacagcaagaacaaaaaaacaaaaaacactcactcctctccctacatacacatgctgtggcatagcataaaaccaaaaaaacagacaaaaycttaaaggtagtcagagaaaacraaacattacataaagmggaacaaaggtacagtggtgcaaagaattacagtaaactttttgtcagaaactatgcaagccagagacaatggagcaacaactctaaagtgctgaaagaaaagtatttgttaaccaaaaattctacaccttgtgaaaataccttaaaaactcaaggtaaataaagattttcttagacacacaaaaatggtgagaattcattttcagcagacctactgtatgagaaatattaaaagatgttcttcaggcagaaaaaaataatatatcagactgcaatgtagacctatacgaggaaataaatttcattctttctttaagatactgactaccctaaagctgtctcacctagagccctttccctcaacttttcttttcttttctctctctctctctcccttcctttctgtcttctcttctcttctcttttcttttcatttcttttctttctttttgacagagtttcactctgtctcccaggctggagtgtgatatcggctaactgcaacctctgcctcctggcttcaagagatccttgtgcctcagcatcctgagtagctggaattacaggtgtgtgccaccatgcctggctaatttttgtattttcagtagagtcggggggtttcaccatgttggccaggctggtctcaaactcttgacctcaagtgatctacctgccttggccttccaaagtgctgggattacaggtgtgagccactgcacctgacaccccctcaaacttttctatttagtgttttgtgtttgtaattcaaggacataacgagaaaagagttcttcctcaaaaaccataccttcagtcccctatgttattccttttttagttctcttactctgtaaaattctttcacactataataaatattagctatacttgcctaggtataggtgtagtaggtggtgaaaatggaaataatgaaggtaaaattaaattaattttctaaatattcttaattactctaaaacaatggttctgaaccccaggagatccctttccattacgattcttccccatgggaacactggcaatgtctggagacatttttgattgtcacagcyggggtggtgctactaatgctagtaggtaaaggtctgggatgctgctgaacaccctactatacatgggacagactcacacaaacagaattctccagtccaaaatattaatattgctgaagtttagagaatctgctctaaaagataacttctaaagcaaaaacagtaacactgtattgtgtgtttacagtatatataaaagtagagggtatgaaagcaatagtacgattaatgggggggaggaattgggactaactattgtgatgtccctacatagcacaggaaacaatgttatttgaaggtaggctcttgttaattaaagacgyatattttaaaacctaagacagccaataaaaataattaagataaaatggaataataaaatacattcaattaaaaaagaagagcctgaaaaggagagcagaaactaaagaatagatagaacaaatataaaacagctagcaagatggtggattttaattgagccatttaaataaccacataaacctcatttawtgagacctgaattaacttaaaaccaaatcaaagacatgacaaaagaaaaatgttatgtcattatccctcatggacatatctatccacatcaaaatacattagtcccacttattggtgggggatattttccaagaccctcagtggattcctggaactgcagatgataccaaaccctatatatactatgcatgaatttcttgttccttcttcacaacagataaagtcacagatggaaaattagttttcatcatggatcttagtaacttcagcatacgattttttttctttccatattaagtcaagaactttcaccttttcacttaaaggaggcactgatgscttcttttttggtagatctgaatggctagcatcactactcttgtgctctagggccattacaaagtaaactaagaatgacttgaacacaarcatcacaatactggatactatgatggttggtctgataaataagacaactcctgagtgagtaacaggtgtgggrgagggtacagacacatggataccctggacaaaaggaggattcaccttcctggtggggcagagccaggcggtgtgagattttgtcatgctatccagagtggtgtgcaatttaaaatgygtgaattgtttatttgtggaattttccatttaatatttccagaacaccactgaccataggtaactgaaactgtagaaagtgaaaccatgaataagaggagactattgtattggcaagttgaatatagcaattttcaactttttattwaaaaagttgaaaattactaggctgggtgcagtaattaaaattaaaaaatttaaaaatattaaaatttttattttaatatttttaaattaaaatatgtaaaaatactaggctgggcgcagtggctcatgtctgtaatcccagcacttcaggaggccgaggttggggaactgcctgaggccaggagtttgagaccagcctgaccaacatggtgaaaccctgtctctactaaaaatacaaaaattagctgggtatgggggtgtgcctgtaatcccagctacttgggaaactgaggcaggagaatcacttgaacctgggaggcagaggttgcagtgagctgagatagcaccactgccattcagcctrggtgacatagtgagactccatctcaaaaacaaaaacaaaaacaataaacaaaaaaacactacacagtgaagtgaggcttacatgggcatgtcatgctggttcaatactaaaaaaattcagtcaatgtaactcatcatattaatgatgtaaagaaaagccacttgatcatatcgacagatgcagaaaaagcatktgaaaaattcaccagccattcatgatgaaaagtgtcagcaaactactaacagaaggaacttcctcagcctgataaagggcatataaaaaaactgtatagctaacatcatttttaatgctgaaagactgaattcttactctctgaaatcaagaacaaagcaggaacgccactctccccagtcctataatttacagcactagatgtcttaactagtccactgaagcaataagaagaaataaaaggcatggaggttgraagaagaaaaaaactgcccctatttgcagacaacatgaacatttataaaatctaggaatttagaaaaaggcttctagaatgaaaagtaggtttatcaaaattgcgggacacaggccaatacccaaaaccaactgtttttccataaactggtaacaatcggaaaccacaatctgaaaatgatatcatttactatagctccaaaaaatgaaatacttaggtataaatctaagaaaacatgcataagatctgtatgctgaaacccacaaaacgctgatgaaagaaatcaaagaagacaaataaatggagcgacacatggtattcatggattagaagacttaagagagtaaagatgtcaattctccctcaactgatctatagacttaatgcaacaccaatcaaaatcccagcaagttttttcttgtaaataaagacaagctgattctaaagtttatatgcaaaagcaatggaactagaatagctaaaacaacttagaaaaagaatacagttagaggaatctcattactagattttaagacttactataaagcaacagtaatcaaggcaatgggatagacacatagatcgatggaacagaaaagataycccataaatagaccttcacaaatatggtaatttgatttttgataaaagtgtaaaataattcaatggagaaagggtggtcttttcaacacatggtgttggaacaatctgtcattcacatgcaaaaggagacatgcatcctcaactttatccctcataccaaaaattaattgactcatagctctaagtattcactgtaagactataaaatttttaggagaacacaggaccacagggacctctttgcttagttattcgggtcagagagaagtactttctttcagtttcatgcctcacattgctgtgtgcctagtgctgtatccgcctatgttgctgccttgagaatgcagcttcatgactgggacttgcttcagtctagggcagggagaacaaaaagaggaaaaaaaaatgaggatttgcccacagatcctccatcccacgggggcccttctttcaggttttctggttagaaacagaggatttctctgggaacyttttctgcccacagttgctgtgcagttcctggatttgcattgccctgcagtctaagctggaagatatggaatgaaaagatgtcaggaaattcactgccctctgggttactttcaggatttgattttcttcccaaatatgcctgctattatttactaatcagcctccagatgctcactttatgtattctgtccaaggattttcgccaccctttctgataccgcaaactgccctccgttttacctccctgcatttccaaatgcatcatcttagtacctcttagtagaactggagccactaattctttcctcttctccatgtgtttttttttttttttgaatcagagttttgctttgttacccaggctggtgtgctgtggtacaatcatagctcactgaagcctcacttcctggactcaagcgatccttgtagctgggactacaggcatgagccaccatgcctggctaagtttttctattttttgtagagatgagatcctgctatattgcccaggctggtcttgaactcctaggctcaagtaatcctcccactttggcttccccaagtgtgggactgcaggaataagccagggtgcctgactaagtttttctacttttgtagagatgagatcctgctatattgcacaggctggtcttgaactcctgggcttaagtgatcctcccactttggcctcccaaaatgtcgggattacaggcttgggccaccgtgtctggtcccaccaactttttgatggaagaagtcaggttcctcgtgtgggtgattgctttgaagtggaaacagcaccaggttctagccaacaagacataagggggccttctgggagaactattttgccctaacaaagagagcgacccatggagaaattctacctccctttctgccattgagcgttattgtataaggacatgatgctcagaagtgtggctgccaccttgtaccacaaaagaaaagcaaaaacattatagagaagcaaaactagagcccagatatgttgagcagtcaattagacaaacttgagccagttgcctttagactcctacttgtgtgggatcataaatttccaatatttaaaccacttttagtgagtagttttaaaattgcaacccaggtcattttaagttataaactaatattattccatttagggattcagccatccacaaaaataactgggatggaattaatgaatatttcttaataattaaattatgttttaaaaatatgggtgagttgctagtttattcactgatttgacatatgtgtgaagattgtttttatgtgttagaacaataaagctaaaaatggatatacaacctgaaaataaatatggattacatagaattattcttgatttctttgtggacttggagagatgttataattctattcatttaaaaaatttgtttaaatgtatggggtacaaatgcaattttgttacatgcatagattgtgtagtggtcaagtcaggacttgagggtatcatataattctattctttattttccttcattcacccttaagaaatattaattgggtgtccattatgtaccggaaactcattctaggttcttggggcactaagaagagccagaaaaagttgctgtttttaaagtgttaacagtatagtaggaaataaagacatatcaaccaatactgtagttaaaatgcagagtgatacaaactaatatatggacatgtataaaattattacaggaataaaaaaagctgttttgaggtatagtgtttctttcctatgataatggatttatataacacgtatgaatacagtccattttgtttggttctagattactgggtagtatcagatgctttaattttcataacttaagactttgaaaggaatatttgtcatagaaatgagtgaaaaatggcccctgtttattggcccctacattgtttgcttattcacagcacagtaggatggttagctcagaacctgccagggccaaacgcaaattctttcacagccaattgcttaaaggtagcccaaataagcatattttcagccacttacagctcacctgctttgcatcctctacacaattgcatttaacatctgctagccacagagaagacaaaccttgtagctgtagaagaccccaaactgctgcagcccttttgagctctctgagccagagactccctgtattgcttctgggcaataccacctggacacatgtgccccctcaccgatccccgtctcccctggaatttcccttgccctcttcttctgggtgtctctggramgtcttctgctgtgaggactttcccttttctgcaatcctgtccaataaagcttgcgttgtgcaatattgccttcttgttctatctttctgtcttttctttgatcagcccccagatcctcaaactcaccattgttctctgctattatttttcttttaatgygcattaatacacacacatatatatacacacacatatacacatatatacactctttggaattcttttccttgtatgtctcttcaatattctctcacacttccttcaaatgtctgcccaaaccttgcttctcaatgagtccttccttgaccaccctttctgatactgcaacctgccttccattttacctccctgcttttccaaatttcccttcccttgctctattttttttcttatttctctgctacttgttgtctattcacatactatatactttactcatatatgtttattgtttattgtatgtcactacctattaggatattatttcttcagaacttgaagatactgctccttggcctcagcagtttcactgttgctagtgacaagtcaagataagactatttccttcggtagccttgaaatttttccctagaaacttttaggttctcttgtttatctgtgtagttctgagctgcaccaactttttaaaagagagcagtcttgttctttcctaccatttgatacttagtaagcatttaattctgaagatgtgggtctttttttcagttctggaaacttttctgtgtgtatacccaaacacacacacacacacacacacacacacacacacacacacagagatctttctataaacataatacacatatataattctgtgtgtaaatataatacacatcatacacatagatacacacatgaacacacacataaaattttatatctgtgtgtattatatttatttcctctctgctattgtagaacttgtggatctgttttttatgcaactgaaggtttatctcatattttccacctctttttgtgatttttaatgttttatgaagaattctttagttcaatttgattttaatagctccattttccccttcagcctaccagttgagtttttaaatatgaccatatgtttaatttctaagatctcttttgttatatttttatagaaggcttttcttatttctctgagggtattaactgccttattttaaaactttattttcctttgtcttctatttgttgaatttggctcctgtcttttgtggatattaattttcctcaaatgttgtgtgattcttgtttggttgcccatatttttatttgagagtctccttttgcctcttggtggtctgagtacagaaccctgtctcagggggtctagggggaggtggggattgttgccgagtaggttgtgtgagaccataatcttccgggcgtaagtcactcttggggattgtgactgatggtggtagctggaattgttctcattgacaggcttttcttacacaagagtcaaccccaagttctagggctcaaatcttccatttctgagagctgtgctccctgcttttacttaggggctaaagccagaacctctgttccctttcaacgtttttcttcctttgttgtccacttcgaagtttagcagtactttggtctttgctcttctgttttcagccccaacatttctacaaagcctgtggctctaaaccttgtttgctcattgcaatcacctgggaagcttgagaaactactgaagccttggtcttacccccatccccacccccaccctgagatcttaatttatttcgtctggggagcagcttggatgctggcatttttctaaattttctagttgattttaatttacaaccaagattgctaaccacagtgctaggaaatggtctcaagcagatctttcctgtaagtgtattaaaagttcttggagtttatcgtagggcagaagccttctttatctgctgctcactgtaagaatcagataggaaggaagggggctgtctacacagcctttggtgacacagtttctttaattagtcatcttcttgtttgaccaatagcctttccttattttgtatctcttaaccttaataactgaacttgaagtacttagaattgcttttacttcaatagttgtttttattatttttcttagttgttttaggctaaagtttctcttccgttttttccccatcactctcctcttagtgatgtatgattttccaagattatttaaaatttctggtgcactgattggcgctatttttcagcatggcagtacattttttaaaaattatttttcttgttatttgcgtggatttgaagaggaatggatggacacatctgtgatcatactaccaaatttattccacctcctagttctatctccatttgtctttctctgctaatagatctataaaatgtggaaagagatgttttacaatctctcatagcaatcctattttttgttttacataatttgatgcttttatatgaaacataaagtttcatggctattataaattttatgtagattttgcctttcatgaatataaaatgaccttcttttctatggaaaccttttttttttttttttwaccttatattaaattttgtttgaaatcaaaggggccatcctttctgtttttaaaatttcatttgtctggtaagcctttgcttattctttcaaaacatttctcattttaatgtgtctctttaagcttaaatagcgtatgtctagatttttaaaatctttttttaaatggggagttgaaataacttaaatgtattatcataacttatatgcttggcctcatctccgttatcttgttttatatttttagattttatgctttcttgctgttttctggatttatgtcttttactttgtgtaatatgctttgtttgcttttaccttttccaatgttctgaaaggtaaacattcctcttaaaattttaattttggtttttagaaaatgatacttaacctattattagaaatttaaaaaaaattaaaatttccatcagaattcttacttgcaaacaatagaaactgactctggctagattaagcagaaaggaatcttctagaaggataaggagctgtccacagaattgataggaaggaaggttttacatggggagaagccactggtggctgcatggcaggactggctaggccacccccaggaatggcagctatctgattgcctctgtttttccatggtctttgtgttccctggacactggcaccagacacttcctcagccaccttccccacccctgctctggacactgagctccacagctgccactgctggatttctgaaaagtctctgctactaagcatcatttgtttcacatgaatgtcccaaacaagagcacaccacgggctaagcttaagcctccagcccatggcagagccaaaaggggtttgagagggcaagtttctggctttttcagcttggaagtgtggcaagttcttgcttgcacccttccccaagtcccagatctctgcccaatatttatccctcctctagttttattataatctcttctcaatattttataaattatgacaaaactgaaaagtgaaatacctctataccagaggtctccagtctttttggaagcagggaccagttttgtggaagacaatttttccatggatgtgggtgggaggggattcaagtgcattacatttattgtgcactttatttctattattattgtgttgtaatatataatgaaataattatacaactcaccataatgtagaatcagtgggagtctggagcttgttttccttcaactagatggtcccatctgggtgtgatgggagacagtgacagatcatcaggcattagattctcataaggagcacacaacctagatccctcgcatgtgtagttcacaataggattcatggtcctatgagaatctaatgctgccactgatctcacagaaggtggagctcaggcagtaacgtgagtgatggggagaggctgtaaatacagatgatgcttggctctcttgcccaccactcacctcctgcttttcagcctggttcctcccaggccctggactggtatcagtctgtggcccagggattggggacccctgctatatacaggggtaaaaaaagagggaagaagagagaatttggttaaaatatattcatagaaggaaggaagtgtgaagagaaatcacggtccttattgcttccattggttatrtggttgcagatccatgctgcccagtgaaagttcttgtaatgatgcaaatagtttgtacctgcactgttcaatgcagaagccacctgtggccagcaaacactcaaaatgtggctggtgaaatgagaaactaatattttaattgcatttaattttaattaatttacatttggatttaaatagccacrtaaggctggtggctccaatgctgtacagcgtagctgtgaatagaatgatattccctttgtcttcagccatacgtcagtgaactgggatctctcccagtctaattctttgctcaatttcaggacaaccgagaaacctagctaattttgcctctatgagacttccatagtcattcactcaaaactcatcattgaacatgttaagaaaggatctaaccatattttcctttgtccttatggagaaggagcaaccttatttcctttttgataattcatgtcaattactaggcaatcctgtaacactgcatttttatctgttcacccgatggtaaagggaatacagacagtctggtggcagttcactgggatggttatctccttccttgcaaacaaaacttccaaactagtggataacagctataagaatgtgtaaagttttttataagtacattaccaggtttaattcttagaggtatcacacctccttctgctccattgtttcctggacccatattctgactgtagaagaaagagaacatacctagaatccttcagggctgcaatctggcctgtctttcagctggagtgactcatttttccacagctcatggaaatgttctataagtctagctccagctgcttttagatgatgggatacataataaaactagtagctggtttattcattttttccccatcactgtaaagtgagttcctaggtcagaaacaatatcctttgaggcaccatgcctgtcatgactatatatgaggtattcagtaatggttgcacttgtagaagcatagttgggaaggaaagcatatcaaagtccaaataataagtgaagataaatggcacctttatcaggaaggaaggttgccaatgcaattaaccttgtgctaggtagctggctaggtrgctatcccccaaaggcatggtattatattgggggctccaggttggtcttttaatgggaaagttgagcaaacagcagatgtgttatctagggaagagagggttggctgacaatagagaaggtmattttatctacctgattattaaaagcatccctgcactgggtattcacgtttgatacaaatattctctccctttgggcccattctgagggtcctctagaatagtagctgaaattggggttaaaagctgcttaaattttgacagtctgctttacttctctaaataccagacatcttcaccaggttattcccttgatcttgtgtcctgatattatgaccatgcctctggcatttaagtgccccatgtggcctctgtcaccctcagatcttcccattttctttaaaatcaaggaaacaatttcactgcatcatgttctactggtctccctgtcccatagggacctgctcaagctgttacaaagaatatagagtgtcagtggtgaaatctatgtcaataaatacagtcttatgtaatatattctcccctccttgtccaatattgtctgaatccattcacatatatattccccatatgttttgccagcataaacaggtgaggccctgcactgtgtgtgtatgtgtgcatgcgtgtgtgcatgtgtgtgttaagcaagcaagttcctcctgggcttgattttgattttgtaatagtatccctggggcatgtttagatatgcttcttagtaaaggtttagggacattgacgaaagggaattctctcatttttaaaatgacgtatgtagagttatattgtaatgaggaatcagtgttcttttggctggcaataaaggcttactggaaattgaggcttgcaggcatagaattctccaaatattttgaatgtaaacacaaacacaaacacacacacacacacacacacacacacacacacacacacaccacactagagagcaccagtaaagaaaaaaaggttaattaaattacagtataaatgcatatttgttctcttttgttatcttaactaacttaaaaagcaattgtaaaaaaatgtagataatgtattgctttgcctataacataggaatgtgttatgtttgtcaataacagcacaagtaggtgagtgggaacaatggtgtgctgggaaaatgattccagatggttacttgatcaaagtataaatgaaggaaaccagaaatgataaatgggaaggttaatacaacaaaagctacaaatatatatttgctcccctttcttttctctgctctttaaaaagacctaaaatcatataaaggaagaattttaacaatgtattattgggttggtaatattgacagatatacaacaatagtactacaataagtaggaaaagggaatggaactattaaaataacatatctgtatttcactggaattaaaatgatatcaatctgaagctgattctggttagttaagatgtgttggtaggccctacaaaagacgctaagaaaatgactcaagaaaagtaaaaaaattgttaaagaaatttaaatgcattagtagaaaatattcactcaattcaaaagaaaacagtaagaaaggattagaggaataaaaaaccatgaaatttatggaaaacaataagtgtaatggtgaatgtaaatctatatcaataataacattaatgttaatagaatatacaatcaaaatgcacaaatgattagattggataaaaaataagatccaactgtatgctgtctaaaggaaataattttgattcaaaaacacaaatagaatgaaagtaaaaggatagaaaacattatgcaaatggcaaccataagaaaggtggaagggctatactaatatcagacaaaatagactttaaaacaaaaaaaggtactagagacaaggagagggactttatagagctaaaagggtcaatttgtcaggaagttatgagtgatcagaagtgttttatcagttttgagaaaccctttgccagtatttgttcacatctctcttaccccattttccttctctttttcttctgtaacttcacttgcttgtttattagatcttctccctaaatcctacctgtctctaatgcttttttctgtgttttcaattcttttttttcctttctctgcttcagtttgattgttttctgttacctgttttccaggtgatggatgctgtgtctaatgtgttattgaacccaactagttagttcttaattttagattttgtttttttttagttctggaatttccatttgatcctgttttcaccattttgaatataccgatgaaattacctagcctttcaattctttatgcatattcttcattttcatattaattgaacattaattgaattgtggttattttaaaatccttgttagttaagactaaaattgggatcacctatgggtctgtttctattggttatttattttcttttgttattttttgacatgtgaaggaatatttgaataaatgccagacattatttatttaaaaaatacagaaactctagattcctgagaaggctcactttcccctcttggcagagtggtggtcagttggcttacttcagtaaggaactgtgctgaatcatggctgcatgagggatgacctctggctcaagactgaccttgtgtagtttcatctaggatgttggtgtgttttgggaacgttcttttttatggatatcaaattctaatctttgtcatgtgagactgacaacagagctctgttttgttttgcagggtcttcccagttacgtttttgccttttgccacatacgggttccagttttcaatacatgttttggggaaaataatctgccatatgcttgaaacctcataattctccaccaaaactcttctgattccttttactcctgctgcagccctcttccagctgttgccctggattttgccctagactcttagcttcttgcccatattcaaattcatcaatacctccaggagaaaagcaactgcagaggccagttcacctctctgtttcttcccttataaagtattagtccattttgttcttgttgccttagcaactcttgtctttttcaaaagaaaatttttgtattccgtctggcttttctagctctggatgggagcactggtctttggacaagtggacaagtaatacatcctccctagaaggtaaagaatctttgtgtagtacatattttgaaatatctttctgtttattcatacaaatttgccatttagctgatatcagaatttgagggacatgatatttttccttaaaagcataaatgtattttttttgtctttttagcattttagagtttatcaagagtctgatttttatttattttgttgttaaacttaaaaaaaaatctgggtgtttaaaggcttatctgtttagtgaaaatactatatatttttccaggatatgtgtttatgtgggttatctttcagtgattttgaagagtttgtgataagctttatacactaagctttcttgacagtttctgtgtggttttcaattaagctctagatgtttgcttcttctctagttggagtgtcttcctgagaatacctgtgactcttaggttcaagctctctttcctttctccttacccgtaatcttcaccatccattttttttttttttggtcactttggtttttttgtactgcattttgaaaaatttatcaaattatttctgtttgattagattttaccaagtttaatcttatgcttcattgaatcaatttgcatttaaatcctactattgtgattttatctttttgaaaattatcctaccttgagtcttttttctctcttttctatgcatattagtcttttattcttagtcttttttttttctttgtatcttggctttctgcttctgtttcatagaagtcatgcattctaataagtatggcaaactaatggaaatttytcctttctttagcaaatcattttcagatatttgttatccttgtacatttttaaggtgatctttcctttcattttcattgcagtattttaaaaatcaactttagtgaggtatcatttacatttattaatatacacccattttaaatgaacacttcaatgccctttgtatatatccatatattcactaccacaatcaagataaggaatattttcacttcctcaaaaagtttcctatacttttttttgtagtcagttactccaacatcattctcatgcaaccacggatatgatttctatcattacagattagttctggctgttcaacaatttcataagaccagagccatctgctatgtacttttcttcctagcttcttttgctcagcttaacattattaaaatttattagtattgttatgcctatcaatagtttgcttctttttgtcacttagtaatattccattgtataacacgctgcgtgtatccattcttgtattgactgaatgtttgtgtacccccagaattcataactgaatccctaatccccattatgatggcatttggaggtgaggcctttgggaggtgattaggtttagatgagacaatgaggatggggctcccatggcggggtttagtgtgcttctaagaacagaaagagagcagagcactctcaatctctctctctttctccaccgcccacacccccaaaacacacactgtggctgtctgtaagtcaggaagaggacccttatcaagagcctgaccatgctggcaccctgatcttggacttcccagcctccagaactgggagacataaatgtctaagtttttttcacccaacctataacattttgttttatcagtctgaggagtctaagacaattctcctgttgattggactcttgagttttttctagtttgcaaccattatgaataaaactgctatgaacattcacgtatcagcctccttttcttcatgtgtatgtttaagtctttgtatatatttacagtaactgttaatgaagaccctgcttgctaattcaatcatttccatgttttctttgtccattccaattaactgatatttctcttggatatcagaagcattttcctgccattttgtatgtggcataatcttcatctgaatgctggacatttttgagtgtctggattttttcctccattcctttaaagattttggagtttttctgtgtcgggagggtaatttactttctggatcattttcatacttttgggatgtgttttcaagtttcttttgagtggatccagagtaacctttactccatggctattaagccttactcctaaggtgcacacattttggagtctctatgactgctccaaatgttcagtggtaactcttcattctaggttgtcagaactcagatacctcctgtactgcctgaggaagttgttcagcttccagcttccctgtaggtttttcctagaagccattctttgcctggttagtcctacgttgcctgttgttcaatgtctgaaagtagttgttacatatattttgtctagatttctagatgtttatgrtcggaagcctagtctggtactggtacatcatcatggctggaagcaaaaatcatattgtagtattttcttttttaatttttattttttgagtcagggtcrgggtctcactttgtcacctaggctagaatgtagtggtacaatcatagctcactaaaacgtcatactcctggcttaagtgatccttcctccccagcctgctgagtagctaggagtataggcactcaccatcaggcccagctgattcattgttttgttgttgttaaagatgggctcccattgtgttgtccaagctggtctttaactctcggcctcaagcaattctcccaccctggcttccaaaaatgctgggattgtaagcatgagccatcacacttggccattattgcattattttcaacagttatttaaaattcattttactatttgattattttattttattcactattcattattttattttattcaccattttcttagagtctatgtgaatggtttgctttgtaacacctttgtccttttggaggtgattgaaacctcttttcaaatacatagctaagacagaaaattaatttcttcctagtcttagtgaaattctcagtgacattcaatacttgtatgtcagctaacattactgagtttgactacatgaaacaatccaatccacaggtccagatctttgacactttgaataaatctactatgaaacttcatgactccttgtatgttctgcagtcagagatcttcatcttttcattcagaggataaatttattgctcttctttgagagttatgaaataagactctccctttctgtctttctggatagtgtagtccaaagatgttacatctagtattgcttcggcaagtttgacaccacgacggtaggtagaaggatggtagtttaagcagaaaatgggatcctactttaatttatacaaaaatatttatttagtacctattgtgcatcagacactcttctatgagctagagatacaaaaatacctgaaccttgcattccattgaatcaaaccactgcattacctaaccctgaaatgcataccatctttagctttttgaagttacgatagtcattttctcatctttattgtttaaagccatttgacttaagttttctgtacttgcaaacaaaggaatcctcagaatatttcactgggctgcatgctcacattgtagtttaccactgccagttccccatccctcttctaacaaaattcttgcctggtgatatttttgataagaatggtagctaacattaattgagcccttactatgtattgggtacttttctaaccactgtacatgcattgtatcatttagtcttccaaacaacccaatgaagtaagtactactattatcgcccttttactaccggggaactgtaaactttctcaaagctaccttgccagtaagcatggaggatttgaacttagcttgtctggtgggaaagtctgagttttcaaccacaacattcttttactaaacacttgcttttattcactggctgtattgtgaatatgttttcgtgcattcaaatatcctcttacaactatattaccattttgctccaacatattcaattatgtaggtaccatattatatttagcctacatctccttttttggcattattttcttctaatttttcacttgaataatgacattgctatgtacattcttgtatatgttactctttttttttttttttttgagacagagtctcactcttctgctcaggctggagtgtagtggtgtgatcttggctcgctgaaacctctgtctcccaggatcaagcgaatctcctgcctcagcctcctgagtagctggattacaggtgcatgccaccacacccagctactttttgtatttttagtagagacagggtttcaccatattggccaggctggtctcgaactcctgacctcatgatccrcccgcytcggcctcccaaagtgctaggattacaggcatgagccacagcacctggccatattactctttttagaaaaccagtctaattatttcttttctttttttttttttttttttttgagacagagtctctttctgtcatcaaaactggagtgaagtggcacagtcaccactcactgcagccttgacctcctgggcttaagcgatcctctcaccttagcctcctgagtaggtgggaccataggtgtgtaccactatacctggctaattaattttttttttttttttgtagagatggggtttctctatgttgcctagatttgtcttgaactcctgggatcaaggaatcctcccaccttaaccacccaaactgttggaatcatagacatgaaccactgtaccaggctactctaattatttctttagaaaaattcctagaagtagaatatctggaaccaatgaccagtctattttaagttcatgatggaatatgcaacgttgtcctccagaaaatattagtttacatttctaccataagtatatctttctcagtattttagtaagaaatgtggtaagcattaaaatttaaaccaggctgggtgtggtggctcatgcctgtaatgccagcactttgggaggccaaggtgggtggatcacgaggtcaggagttcaagaccagcctgaccaacatggtgaaaccctgtctctactaaaaatayaaaaattagccaggtgtggtggcacgcgcctgtgatcccagttactcaggaggttgaggcaggagaatcgcttgaaccccaggaggtggagatggcagtgagccgagattgtgccattgcactccagcctgggcaacagagcaagactccatcaaaaaaaaattaaaccagaaattccctttattcatttttagcccagatttatctgttcctgatcactttatttctcaaggctatcagtgcttatcattttttcctcttgggcagtatctatctgaattctgtatttttaacatgtattttgactcctcatgttcctagttttaaagaattagtctgtgaacttgctgtgggtttaaggttttttcctgagaccctgagacctcactaagattttcacttggcagggttaaagagtgaaataatcacctggatatcatggctgaaaatgctattggaaagtgaagaggaggttgcatgcagtggctcagtcctgtaatctcagcacttagggaggctgaggtgagaggatctcttgagctcaggagttcaagaccagcctggacaatgtagtgagacccactctctactaaaaatacaaaaaattagccgggtgtggtgggacatgcctgtggtctcagctattcaggaggctgaggatgaggcagaaggatcgcttgagtctgggaggttgaggctgcagtgaactgagatcctgccactgcactccaacctgggcaaacgagcaagaccttttctcaaaacacaaaacaaagaaagaagggagttgggttggaatcacttaatttgagaactcatttatatctcattaactagtttcctgtttttattttaaaacccagatatcacagtgaaatttaaactcatattcataaaggaaaacaatctgcaaagtccaatctagtttatatcattagtaagaataatagtatggtttaaataagatctatatatttttactaatattcgttctgctttcacaaatatattgccaygtgtagayctctccttcataccaagagttcagttggcaccatgaacagttcaaaacactaatacttgtgatcacagtattggttcttaattaaacgtacaattcccccccacacactatttatggattgctaaaacaatattttcacctttatctttggctgtcagatagcaagttggacagtgaagtagaactgacagaaatgaagataactacaaagttagcattgatttttgcctccccccctctgtcttttgagattgtttcttcacatttctcatatcttttctcctgacttatgaaaggcaccctttcttgctctaggcctttcattgttttgaaacataaaaaggaacatcaaagactttcatcgtgtgcgttttggatcttactctacgttgacaatatcgagaggttcacattcctactaagcctgtgggtttagttcagcaatgctccccatttttctctactgaccataacatttcaaccctgctggaatctttgaagatggttattgagtgactttagaatcatcctcggagttagaaaaccccagaaagcatcttttctttggtattttattctacatcttgaaaacagtaagaacaaatgcacttctctggggatataatgactaggaatggagaccatactaggaaaattgacatgaagagcaaaaagatccactcaaatagttcttttgcactatacaatgtgtcacaagttgcttcttaagaagaaagctagtcaaaatatagcttaccttttgtgtctcagatggctgggctttagaaattgagacactctggtcaaatatctagcttcagaaggtgttgtttacatcctcatcaattcatctattatttgcaattgtttgcatttcaggttttagaaataaaaaagtgttataagaattcactgtatacaaactgacttaaatgtttttataggcttagtcaaagcctgatttctttacaagattagttctaaatgaaaatagaaagagcttttgatccctcccaagggagtattcccagataatattattcatttactcttccttataaatgattttctctgcttataatttgtggtttatgttttcatacttgcagttggtaaaactgtccacgaaatcacttctgacaccaactgcaagtttgggggttcccacgaccaccctcacctctgacaccagctgtaagaatgagtgtctatgaggctactctcgggcttgataatttgctagactcactcacagaactcactaacagccattgtcctcatggttacagtttattgcagcaaaagaatatataccaaaatcagccaaaggaagagatgcatggggcagagaataggagaattcaaaacgttgagcatctagtcgtcctctcccagtgttaactgcacctggaatgatgtgtaacaatactcagttagtattgccaactatgtgtctgttgtcacatggcactatttaacactgagctgtggtgaccagagttttcagttgggtttcagacacatagaatggttggctaactcaatctccagcccctctggaggcagagctgatactgtgtaacccaaaacttctaccataaatcccattgctagawgatctgggatggcccaaggctcttagctaaactaagacagtcctgtcaggcagaacattctaagggttcagagattgtctcccaggatccaaggacaaaggtcagacctctctttgggcaagattaaattctgtattacacaataccagatgagcagctgtcttttgatggctgtaaatggatagtgaaggatattttcaatatattttgggtaggagtagtgatctgtcatttcaggaagattacaggagtgtagatttgtgtctggtaggatgagaaagccaccgtttgaacctgtagataattctgagaccactgataggaagcatttatcctttggccaatattaggttggttgccatcaagtgttagcagcatacaacaagcttaggttttctaaaatacaaaaagatccttactgagagcatattagaggaaactaattctgtggaaggagaagtatatttgcttcaggattaagaaaaaagcagcatcaattctacattccatttaagtacatttccatttgcttgagaaaacacatccattatttagttgcgaatcaatttttgagtgagcagtgaagaaagacttagacgagagtctttctgaaagcttttatgggtagaattctacaatagagacttgattgttcctcattgtttcctccagttccatgaggattctatgtcatctctcctaagttcccttttatctcccccattagatgagaaaatgtgcaccaggccatctcctgcactcttccccatcttggctaatcattgctccatctatccatttgctcaggccaaaacctatgtagatatctgtatcagttattattgttgtgtaataggctactgcagacttagtggcttaaaacaacacccctttgttagctcacaattctgtagttcagaagcccggacatggcctatcttgactctctgctcagggcctcacaaagccaaaatcagggtgtcagtctgctgcattcttatccagagctcagggcttttttccaggttcatccagattggcagaatttaattgcttgtggttgtggaattaaattttccattttcttgctggatatatgggctgaagtttactctgagctctttggggcttttctcaggtcctagttgtgtggatttctcaaaacctggcagcttccttttctgagcaggcaggatgatctttctccagtctgccaagacagactcttatataatgttgaataatcactagagtaaccatcctactacctttgtcacttaacacaacctaatcaaaggagtgactaacccttaatggttacaggtcctatctgtggccacagggagcgattaagcaggggttgggggttttgggacatctcagaattctgctcatcaccatgtctttgtattgtattacattattcttcttcttattttatagagacagggttttgccatgttgtccaggctggtctcaaactcctgaactcaagcgatccacccaccttggcctcccaaaatgttagtattataggcgtgtgtcaccacacctggattgtgttacgttatttaataaaataatcatgtatctctttgtaatattaaaaaagactttaaatgaataaaatctagaaagaaaaaaataaaccagagactttaaacattcaaataaatgggggaaaacaaagaagattttaaagtttaatacatgcaaaatgttaaggaaaaagaaaaagggaagcaaagaaattacatggttaaaaaataaaataagatggtagaaataaatcaaaatttatcaatagtgccataaatgtcaattgactaaacataccgtcagtagagattctttcattggatgaaagaatataatccaactacatgcagtttaaagagtgcccctgaactatggtgatacacaaggtttatccactaaattatttaactaatattgtttttgtttctaagggctcttcagggagaaaattaaagtctctgtgctcctgaagctcacgttatagggtgggatgttgatgaaaaatgaaaagctatgtaataatgtagagaatgatcaatgctactaagaatggagcaggacaaaggggtagagagtagtttggtgggtgggaaggcctggatcttttagctgggctgtttagggctgactctgagaagtagagatctgaatggtgtgatctgagagaccaaaatattatttaatagatgctcctttatcaactaagatggaccctacggttaaggtaacttttgttttcttaaccttagggtccatcttaattgataaagttcgattttcagaaatcagctaatatgacaaatttccaaattctaaggctacaagaaaaaaacacaatcttgctaaattccctaaaagtaggagctatcaggctcctcctaactctgatttacaacccagaccactacaactctgactggactgaggaccggccttacaaacattctttcctgataagcaaatgtagaccttaagccagcttcagccagatatagaggctgtgcacaaactgtctccatgtcctgtagttcacctttttgagatgcccaggtgggaaggactccctggcagaacttccaacagacctgtgcgctgggagcaacgcgcactcgggtggagtcttgggaagtttgccccgtttccagtggggaggagcctggaccccctcttcctgggtggaacctgggattcagcctgcggggcagcaagcaygctagcaggactctggctttgagaagggtccctttttccccctttttgcccaataaatttcattttttctcacccttcaaagtgtccgcgagcctaatctctgatggtcatgtgacaagaacccggctcttagctgaactaaggaaaatgtcctacaacatttcgacataaacagccaaattccattctattttaatactaaaaccctgcccaaagtgaacatgggacgtatattacatatatgtttatccattgcacatctgctcggctccacttgtaaatatgcatagcttttctccaaaacctgctgaatatgtatgactctattgagtaatatgtaccctgtgtggcataaaacccaacctgccctttccctccttgaagcaagagcaccttcaacccacaccagggactcttcctgttttgcaacctgataatgccaataaagctctcctttctactatttagccctcctggtggtcttttggaccagaatagattgagggaatgagccacgtgggtatctgcatgcagaataagtatgaagaccttgaattgggatgtgcttgtcatgcttgagtagcagcaggctgataaaaatgccactaaagcagagtgtgcaagggaggacaggtggggaaaggaagtggcaaggggcaggtgatgtaggtctttaacaattatgctaagtgaaataatccagacacagaaaaacaaatagcatgtggtctgtcttatatggtagaatctaaagaaggtgaatttgtagacggagagaattacagtggtgcttgtcaggcactgggtagcaggatggtttagagggaattggagagctgttggtcaaagggttcacgctttcwgttataagaacaacttctggggatctaatataccatatgagtggtgatggatgtactaattaagttgattatggtaaccattcacaacgtatatgtacatcaaatcattgttttgtacaccttgaacgtattcaatctttatcaattaaatattttaaaataaagaaatagatggggaaatatatttattgaacacctattttgtatcacacttggtacctagtttgggaacacaaaatggacaagacagatggggtcttgccaccttgaagcttttgctaaatcatgttccctatgaaatattacttactgttatgacactgaccaaggttctttccttgtcctgactctaatcaggctgcattcagcctttgtggtctcaaccttgggctttggtgcctattcttgtggattccagttgtagcaagaatcctgcttaaagtcagtttagccagaactccaactcttgatacttagtcaccctcattcttcaattaaattcctcatctctcatcatcccccaggtaatatctgatcaccttagcctgctctcagcaagaatcttgccaagttggtttggtcagaatcctgtctgatgtttcctgttagtaattttgcatccactgatccctgccctgctccttggctgtaaatccccacttttccttgtattctgaattgagcccagttctatagtcaggtctcttttctcctgttgcaataattcctgagtaaaatatatttgtcacgatttaactcctgccatctctggtattctttgacatcacaaatacataaacagcaacaacaacttggtctccttgaaaataatgggaacactcaagctcatctaggaccatggaaatagcttatttccttatatctttcccttcatcttctttaaaagctatgatctttcaagagctacatttagaatcttacatggctgggcaaattttgatctatcttttggtgaatgaatcactgactattcaaccatataacaacttctggctgcattgttacccagtagcgagagtttgccaaacagtactttgcatgacaaactacactgtatctgcccatatcccagctttccaagtaatctttggaaagtgtttattataccacaaagtttccaaatgtttatttcaattgcttaggggaaaaaggattggtttggagggcagtgaaattggttgtttttcctacccattttccatgtgtttcactccattaggtctgggcttgcaaagtttaggaaggggtttgtatgtcacaattcaactgcaaatagaacatagcaaattctcttgtgagtgttttggaaaatgtatgctgctctttcagtgcttcatcaggctgtgagagattgtgaaaccccacagctttcacagttttgcagtcagaagaaagccttttttgtttttattactgagcatttaaaactcacgagaaaaaatggaaaagccctagaataaaagcgtgttgagaggaggttcaaggcagtggcaagaatggctatcccagttttgggtcaaaacaagtgacaactaacaagacagagaacatatttatgcttgctactttaatgtttggtctcattatcttattagatatattgaacgatatttgtaaataggcagggaaaattgaagctttgtgtgtgtgcgtgtgcgtgtgtgtgtgtgttttattataggtagcttttatagcatgggatttctctcataacaggtagaggggcatggttccttccccattctgaagctttgtgttgtttttttgcttttttttctagtataaagagttcaattagggtaactctgccccttacctcatttgtcctggtgatacgtatgaaataacaccaatttgctagttagattaattgtgattagtgattagattaattgtgtgcactccacttcttcttgctcatcttccttttaggaggaaggctgcccttggaggggaaatgttccctmtgttcctttcgcccatgagaatgggcctgctgtcttgtccactactgcctgtgactggctcagaagtgggcctaatgctgggattcattgaatgtgccttcctacccagctgtatctttgtaaatattgatcttttagtttctatctttaatcttttatgtttatttttcaaatttttcagaagcttatttgggaagaagggtgctatttattggggccaattcagagacctaaactgtaactcaaagatcagttctatgaatatagaatacagaaatccaatcatcattgcatgagagagtgccaagttcaagccaatcagctaaaaggcaaatctcaatgttttgtctctcaaaacactctctgcataaagaccttggacatactagtttaaccaatagaaaagcttgtcagggccaggcatggttgctcggcctgtaatcccagcaatttgggaggccagcatcgaaggatcacttgaggccagaagttcaagactagccaaggcaacatggcaagacccgatctctacaataaattaaaaaaaatatattagtagggcatggtggcatgcgcctgtcatctcagttagtcaggaggttaagttgagaggatcacttgatcccaggagggtgaggcttctgtgggctgtgattatgccactgcactctagcttgagtaacagagcaagaccctatctctaaaacaaaacaaaacaaaacaaaacaaaacaaaacaaaacaaaacaaaacaaaaggctaatgagcattaaacctacagaaaggaatctgagcagaaaaagccaatggtcaatgatagggaatcctgatttcttactgacacccaaaacactaataaatctcttgatgatgtatgagttgctgttaccttgcacagcagtgagcagttctatatggcaattgctcagttagctctcaacttcctgaacagcagttgcagttattcagccttgctcttaagcgttagtctgcatgctgagttttagactagctaactgttagaaaaggtggatgctgagacctgcagagggaagttctcatgacacagatgtatgtgtctcaaaaactgttttctcccagtatgtagcctccagagagattccctgcctggcttggctctggggtgaaggaggctggtggttttcaattaaatgcttataaaatattttagaagaaacagggacagattgtaaattataaaaatgaccacagaagtatttccagccccatctgctcttccagaaccttgtcactccccatgaaaaggtagattttatctgggtagggctttcttactgccttgaggcaaaaatgtggttctgaaagtgatgctgggacataaaagaccgtaagatacttctctggctctttcttaggatgcggttccctggaaactgagccaccacacggtaacgaagctgtgaaaaaagaaatatatatattatatatatatagccatgcacggtggctcacacctgtaatcctagcactttgggaggccgaggtgagcagattacttgcagtcaggagttcgaggccagcctggccaacatggcgaaaccctatctctactaaaaatacaaaaattagccaggcatggtggcacacgcctgtagtcccagctactcaggagaggcagaggttacagtgagccgagattgtgccactactccagcctgggtgacacagcaagattctgtctcaaaaacaaacaaacaaacaaacaaataaacaatatatataggtctccatccacagtttttttttttttcttttttttttgagatggagtctcactctgtcactcaggctggagtgcagtggcgtgatcttggctcactgcaacctctgcctcttgagttcaagtgatactcctgcctcagcctcctgagtagctgggtttacaggctcccaccaccatgtccagctaatttttgtatttttagtagagatgtggttttgccatgttggccaggctggtcttgatcacctgacctcgatgatccccccacctcggcctcccaaagtgctgggattacaggtgtgagccactgcacctggcctccactcacagtttttaacacagaagtttcaaaacttttgtaaagagaggtgccaggagaatcttttgttctaatatttggtcttagaccccagttccgtacacagggtttctaagacctttgtaataaccatagtgataggagcatctgacacaaagctcctaaatcccttggaatttcccaggtgataggagcctcttttgttctagtgagctgactcttggtgggctcctgggtgggtactggtcaccagaaaaaccaaggcatgcttagaagcttggaacttttagctccacatctcgtcctctgaagaggggagaggagctagagtctgagttaatcgatcaggcttaccagtggcatttagaaatggtgctagacccaacttctgaggagttggcttattggatacatgaggaaatgcaaaacaataagaaacatactaaacatacaatcctttggttattgttatttataacagcaaaaaatgaaagaaagtacagagctggactttgggtcctgcacaaagctcagttttggtttgaatgagcttcagctattagcctcaaagatgcttgcaaagggaaaaattaagcagggacaacagaaagtatctctggtcaccaagagggcagtcagcttggggaaagggacaagccaagagactactgaaacctgggggtattgcatgaagaagttatctcatcttgtggattgataccatcagctccctgaagaacctttactaacgtggattgtgagagtagctaatttgggggctgtgtcttttgttttgaatgctacagagtggaagcacatgcttgagttgattcaggatccacaggtcactattgaacaatccctctacacagggagttattcctatacagtatggctataaagtgtgtttatcctaaaagtgggattgtaactcccccataaatcccaagtggaacatctcagatgatgcagctgataggcttcatatgcaagctttatgaggagtggctattcgtttgctgaatatgcctgtaactgagcagcttggcttcaaatagcattttaaaactttgctttctgtcctcctttctctccaatctcaagatataactttgagacaaattgtatatgtgttacctgtcatcttgaaatacagccttggaatgtgctgtgaacatccactccttttcttttcctgttctatgctaccatgtctgatgcacgtttatttacctatatgcttgttaagcacacaccatactcacttatctggtcatatgtttccttagaagcttcaggggctggatcctgatatggaccagacacctccagccacaatggcaccagacgtttcaccagatggaacaataacttaagacaagccatcatattggtcatgccacctgatacctcctaggccccctgcctcttctgcattccaaaccttctctttaaaaccaacccccgtgttctcttcacaaattgaagagtggagatttttggaaagtattacaccccttcttccccttcctagcatggataataaaatctcactctctttttgtcacacttcactcttgttatattggcttctttttacaagctacaagcagccagacccttttgccaattacatgcccattatgaggcytatggaaaatgttgtgattaaaggagttccttttccatgggcaccccatgtgtacttctgcaaaatggaacaatagcttgaaaagccttaccagatttgctgtctcagcttcccctgtgggtcttactgatcaaggacattatagtaaataaaaaaaaaatgagagagacaaagaagagagtcatggacttgtcccagcagggtaggagtctttagatggttattgagaaactggatgaatgttgtggatattgatggtgttgaaacaaaagtattaatgcagcactattgaaggttagatgaaccaatgggactttctgtttgtctcccaacattgaaaggctccaacaagttttctccatttaccccagtttggagaaacttaaaaagtcagagattactcagaactggttggggtgacggttaagcaggttaatcaagattgatgargggccagggtctcctggccagacctcaggctggcaggggtcccaaggacatatgcacatgtgtagataaaatggtcagtggaaggagaagagacttttctgggactccttggtataggaggtcaatgcattgtaattccaaaagctgttggtgaagacttaacaggagttaaagttaagattgggggagtatatggagcttcagtggttggtggggttaacatggaagtttggaggacaattggaattcttgaaaaagctttatgtgagttggttgtgtcacctttacctgaatgtattattgggatggatattatgtctgactgcggattgcttcccctacctaatattgttattagaagttatgtaagtcttccctcaggccagttttctttgaatgtgctaaatgagaaccattagaactgcctgaatccacacaggtggttaatttaaaacaatatggagtacctgacagcagcagaggggggtgggggggtggggggcaaaaggacattcacactttaattaatgacatgctagatgcaggagtgctgatacaaaagaattttttgaacaacagccctgtgtggaaaaggaggatggctcatggagaacaaacagtagattattgaggcttaaatacataaatttgtacctcagtacaattttatagcctcagtaattttagtcatgatttcaatcatacaaaaagactgctactcagtgatcgaccttgcaaacattcttctctcagtctcagaaagtgccaaacactgtttgctcttatatgggaaggatcccagtttatgtatactrtgctaccatagggtcatctgaactcactggtttactgtcataatttggtcagaagggatttggatttgatgtaggtctcaagtgtaataatacactatattgatgatgagatgataatattggaaactaaagagccaggttaagactgagttgaatgcagcgatgactcacatgaccaaccaaggctgatcagtaaattcagcaaacatccaaggacttgcccacatggtaaaattcttaggaataacataggcaggagccacccagttccacaagtgactacaaataaactgctgttgttaatcacccccaagaccaaacaagacatctagcatttggttgttgtatttggagtttagagaatgcatattctacatctgaaaatattgctagcttctatacataagactacctgaaagaaaaccattttgagtggggacctgaacaaaagcagaccatgtctgaattacaaaaatcaatagctctctcaatgcctctgggccattatgatctccattcagatgattttggaagtgtctgctaccagtgctcatgcaaactgcagcttatggtaaaagcctgagcacctgggattccagatgctgccgccccatacacatcattcgagaggcaattactagcttgctgttgggctttaattgagacgacctcaatgactgaaggacataaaataatcatgaaacctgagatactgataatgtcttgggtgatgtcagagaaacactctaataagaaaggcagtgcccagaagagctccatgataaagtggaaatggtttatacagaagcatgctactggtggaatgcaaggaggcacctactgtatccataagtagctagcctcaggtcccctaggactgacttcagaatcactggaagaactgccagactctattgccatgtggaagtgccctatgaacagctcttgatgggctgacaaagaactgctgggtttatggatggcagttccaagatggatggacattatgttgtctggagatatgctgtattaagaccagaagatacaaaaactagtttaagaaattaagaacaaattggcttaatgggttgaattacatgccggttttttttttttttagcagtgatggaagagtttaacaatggtaaaagcccttatgtttgggtttttataaactcatgggcaatagccaatggtctggctatgtggtcagatagatggacaatggaaaactgggctattgaagggatggtcttatgtggtgtggccttatggaaattactatgggaaattaaggggagcattgaagaactacttacaggttcaggaggtgacttaaaccatcatatagacttattgatgctctcccatgaggtggtgagctgggtccatgaaataagtgaacatggtgtgggggttacagccatgcagaaatggactgaatgtagacatattcctcttcactctctgaagcacagaatgtcaccaagaactgtttcatctgtcaacaggagagatagagattgcagatggctacagagaagattctacatggggaaggccccacacatagctggtaagtggattatattagaccaatgccagtagcccctgggagctacaaatgggtcccagcaggaatagacacttactctggactggtagtaaatgcaaatgctgaaaatactatttaaagattggaacagacaatactgttccaatttggctcatcaagctacatttctttagcccaaggatgcactttacaacccatagtgtccaacagtgagcaaagaaatactacatcaaatggacatattatgttgcatatcatcctcagggtaatcgtttaatagagaattggaacaggcaattgaaatatttaccacctaaaacaagagaagacaaaggcatgagggacttgccttcatgagtgtgtgctcacactcaacatgggggaggataaaggaaggctccccctggatagatttctcacttttctgggggatctggcaaagcaggggtggaaatctccctcctgctgccagtgtggttatatgatttttcccatataatctcactttttttttgtcccagtaagaagcactggagcactgcctgatgccaagggtcctaggaccagggatgtgactgtgtacatcctcgtaagcaaggatgatttctaggcaagaargtgtaactaacttttaaacatctatgccagaagtcctaagggcctgatagtgtgaattcacatctgtgaatattgctgtgttgcctagggattgggctagccctgacatccccgataggacagttctgtacccaggtaacctgaccctatctgaatggaaatggactgaaagggaggcatttgttagactagcatcactgtcagcaatggccctcccaaagatggaaaactctgggtcagaataaatgacaaatggagagaaggagtaatagtagccgggggtaaaggaatacagtgcatacatgaggtatgcaacaagggaaatgcaacattgtcttaatacctcaggagagactcagatcaggatattatttcttagcacaattatgaacagatgtttggaacggtgaagctgtatgtttgctgagaccacccctgcttttggaacctttcaaggttgaacgacagcctgcaaacctgaaaggcatagttctgggagccattctggtcatatggtatgatgatgaattagactgttaatgaccaaatgggactctagtaacgtatcagtggtatcttttgacttctatattttaggctacatcaactacaaaggatatcttttggggaggaagttttgaggactgctttctactgagacttcaatctatgtggtgtatggctctcaacagactgatcactatggtaaccacaaaacctacaaaacctgatggtcaaatgcttagaaaggtccttggttatgatagaaaaaatatgatggtagcatgcccaacatagcatgcatttaggctatgcataaatacataccactcttgtttttgtggacagaaagctattaagcagtatagggaaaaacaatgggcctctggtaggattaaagaagttggcatcacattgtagatccaagttcccctggggaatgaccccactcgaaataaggaaggctgtgagaggccttatggcacactcaaattaaattacatctacctgtaaacaccaatcatctaactctagtgtggggacccaaaattttttgcaaaacatttatcctaactgcattcgygccattagtacgcaataccaatgatatgcatggtagattaaacaacactggctcctaagacagaaaagggcctcaggagagataggtgcaggtctaggtatcctgggacaagctgagtttactcttaatgtggagcagcattcggaggaaaaagatttattaactagaagagacagaatagaggaaattctcttcaaggaggaaggcaaaggatggagtcggggcggaaagataatgaggctttagcgaagtggatcaggccaactcaacaaacaatgctgggcactgctaacacccagcccaggggaaagggcttgtaccctgacccaataggacctcttgactattttaatacagatggaagctgaagtggccatggggcagtgacctgctattctggctgctgaggtccaagagacccacccatgggagtctgatggccttccaaacttatggaagttctctgagggcacttgtagttttacactgatagactatgaatgctctcacccacagcatagatcaaaatgaaatacatcctgcagtacagttggtagaaatgggaaccactctgaataccacctgtgtcctccctgcaagaaggaggtgggccttgctatctaataatacacaatggaaaccagcctcagtacaagcctgtgagatgaggtggggtggttctttttgtcctcaattaactagaaacccagatataactaaaccatggccaactgtaataatgcccttccttaataatatctgacaaatggacaagagtagattctgttgggaagacaagacaaattcctctgtaattcttacttatttgttcttttatgaaactgagttgtcccatgaccatacggtgatatggtgtcatactggtgctgtaagtaagattcaattacctggtataaataaatcttatgatactactgatattggtgactcaatgtaatgggagattgagttaaagtctctccaggatgtaatacttatggaaaataactgacttgaagagaaattggatttagctaaccatcagctgatttttctgctaaatagttctgcaaagcttattacaagacacaaatagcaatagaatgcacaaattagtacaagaatatgaaaatgttggttatgattttataggataaattagctgttcctttaaatctatccctactccaccctgggggttcagagagcttctgggtaataagtacatctgtgtgctgggtgagggaggcacacccctattccatgaggacagaaacctccataaacaggacccttctacaccttgccctgtgtatctctccgtttggctgttcatttgtatcctttaaaaaggactaagaaactcactcaaaaccgctcaactacatggaaactgaacaacctgctcctaaatgactactgggtacatagcgaaatgaaggcagaaataaagatgttctttgaaaccaacgagaaaaaagacacaacataccagaatctctgggacacattcaaagcagtgtggagagggaaatttatagcactaaatgcccacaagagaaagcaggaaagatctaaaatggacaccctaacatcacaattaaaagaactagagaagcaagagcaaacacattcagaagctagcagaaggcaagaaataactaagatcagagcagaactgaaggaaatagagacacaaaaaacccttcaaaaaatcaatgaatccaggagctggttttttgaaaagatcaacaaaatggatagaccactagcaagactaataaagaagtaaagagagaagaatcaagtagacacaataaaagatgataatgggaatatcaacaccaatcccacagaaatacaaactaccatcagagaatactataaacacctctacacaaataaactagaaaatctagaagaaatggataaatttctggacacatacaccctcccaagactaaaccaggaagaagttgaatctctgaatagaccaataacaggctctgaaattgaggcaataattaatagcttaccaaccaaaaaaagtccaggaccagatggattcacagccaaattctgccagaggtacaaggaggagctggtaccattccttctgaaactattccagtcaaaagaaaaagagggaatcctccctaactcattttatgaggccagcatcatcctgataccaaagcctggcagagacacaaccaaaaaagagaattttagaccaatatccttgatgaacatcaatgcaaaaatcctcaataaaatactggcaaaccgaatccagcagcacatcaaaaagctgatccaccatgatcaagtgggcttcatccctgggatgcaaggctggttcaacatacgaaaatcaataaacgtaatccagcatataaacagaaccaaagacaaaaaccacgtgattatctcaatagatgcagaaaagtcctttgacaaaattcaacaacacttcatgctaaaagctctcaataaattaggtatcgatgggacatatctcaaaataataagagctatctatgacaaacccacagccaatatcatactgaatgggcaaaaactggaagcattccctttgaaaactggcacgagacagggatgccctctctcaccactcctattcagcatagtgttggaagttctggccagggcaatcaggcaggagaaggaaataaagggtattcaattaggaaaagaggaagtcaaattgtccctgtttgcagatgacatgattgtatatctagaaaaccccatcgtctcagcccaaaatctccttaagctgatagtcaacttcagcaaagtatcaggatacaaaatcaatatgcaaaaatcacaagcattcttatacagcaataacagacaaacagagagccaaatgatgagtgaactcccattcacaattgcttcaaagagagtaaaatagctaggaatccaacttacaagggatgagaaggacctcttcagggagaactgcaaaccactgctcaatgaaataaaagaggatacaaacaaatggaagaaaattccatgctcatgggtaggaagaatcaatatcgtgaaaatggctatactgcccaaggtaatttacagattcaatgccatccccatcaagctaccaatgactgacttcacagaattggaaaaaactactttaaagttcatatggaaccaaaaaagagcctgcattgccaagtcaatcctaagtcaaaagaacaaagctggaggcatcacactacctgacttcaaactatattacaaggctacagtaaccaaaacagcatggtactggtaccaaaacagagatatagatcaatggaacagaacagagccctcagaaataatgctgcatatctacaactatctgatctttgacaaacctgagaaaaacaagcaatggggaaaggattccctatttaagaaatggtgctgggaaaactggctagccatatggagaaagctgaaactggatcccttccttacaccttatacaaaaattaattcaagatggattaaagacttaaatgttagacctaaaaccattaaaaaccctagaagaaaacctaggcaataccattcaggacacaggcatgggcaaggacttcatgtctaaaacaccaaaagcaatggcaacaaaagccaaaattgacaaatgggatctaattaaattaaagagcttctgcacagcaaaagaaactaccatcagagtgaacaggcaacctacaacatgggagaaaaattttgcaatctactcatctgacaaagggctaatatccagaatctacaatgaactcaaacaaatttacaagaaaaaaacaaccccatcaaaagtgggtgaaggatatgaacagacacttctcaaaagaagacatttatgcagccaaaaaaaacgtgaaaaaatgctcatcatcactggccatcagagaaatgcaaatcaaaaccacaatgagataccatctcacaccagttagaatggcgatcattaaaaagtcaggaaacaacaggtgctggagagggtgtggagaaataggaagacttttacactgttggtgggrctgtaaactagttcaaccattgtggaagtcggtgtggcgattcctcagggatctagaactagaaataccatttgacccagccatcccattactgggtatatacccaaaggattagacatcatgctgctataaagacccatgcacacgtatgtttattgcggcactattcacaatagcaaagacttggaaccaacccaaatgtccaacaatgatagactggattaagaaaatgtggcacatatacaccatggaatactatgcagccataaaaaatgatgagttcatgtcctttgtagggacatggatgaagctggaaaccatcattctcagcaaactattgcaaggacaaaaaaccaaacaccacatgttctcactcataggtgggaattgaacaatgagaacacacggacacaggaaggggaacatcacacaccagggactgttgtggggtgggaggagggggagggatagcattaggagatatacctaatgctaaatgacgagttaatgggttcagcacaccaacatggcatatgtatacatatgtaacaaacctgcatgttgtgcacatgtaccctaaaacttaaagtataataataattaaaaaataaataaataaataaaatgaactttgtaaaagcctttgtaataaattggtaatagtacgtaaaccattttcctgggctctgtaagctgctttagcaaattgtttaactcaggaggggattatgggaacctctgatttgtagtcaagctagacagaagttgtggggaacctgaggacctaccacttgtgattgaatctgaagttgggggcagtctggtggggctacagccttaacctgtgcagatactaattccagttagtgtcagagttgaattgaatcataggtcatctagctggtacaggagaattgtacagtgtgggaaaaaaaatccatatctgactacagtagtgtagagtgtgagtayagagaaaaacagttgatttttcctatacattttatgtcagaagtgaagcacgtattgagaatggtgtgagtatagaaggaaaagcagtttgtgtttctctatatacaagcccaggccacatggagagatatgtgcaggtattctagccgacaaccccagctgaggtctcagctgatagaatcaacctccaactataagtgagtaaaccttcaaatgcttccaggcctcagcctttgaaccccagccaatcctgggtggaacagagatgagctaacctaccgagcctgctgaaattgcagattatgcgaaaactaaatatagccgttattttaaaccactgcattatgaggtaattattatgcagccacacaaacaggaatggaacccattttattcaatgacagcttctgccactttgctgaagccttaatcatgaattatatggcaagaagtagatttacatttatgaayaggtcaagaggaaagaaatgaagtcttgttagaacaactgtgtttctggaaaaactttttctctggtaaaagtttcagcaattgtgttagtttctcgtggctgtcgtaatgttaccaccaatttggtggcttaaaacagcagaaatttatgctctcacagttctggaggccagaaatcagaaattggtatcactggtgacaccatgatgaacctggacaacattatggcaagtgaaacaaggcagacacagaaagataaatacaggctgatctcattcatatgtgaaatctcagaaagttgaacccataaaattagagagtaaaatggtagttaccagaggataggggaggggagtgaatagsgaaagggaagatatcgattaaaaggtacaaaatttcagctagacaggaggaatacacttagtgattcattgcacagaatggtgactataataaataataatgcattgtgtatttaaaaattgccaaaagagtagattctaaatgtttttaccacaaaaagggtaagtatggtaattagcttgatttgatcattccacaatgcaaatatatatcaaaacatcacattgtatctcataaatatatataaaattatttgttatctcaaaataaaataaaatttaaaaaataaatcagtatgactggtatgaaaccaaggtgctggcagggctgtggttcccctggaaattctagaagagaatccattctttgccttttccagcttctgtctgtggataccagaattccttggcttatgtctacatatcattccaatctttaagagtgccatcttcatatctctttcctctctcttcatatccttttttctgtgtgtcaaaccttcctctgccactctcttataagaatatatatgactgcatttagggcccactggataatccaggataatctccccatataaaaatccttaatttaatcacatcttcaaagatcctatttctctgtaaggtggcatgcacaggtgcctgagattaagacctaaataacttttgggagccaattttcagcctcacattgcaaatatttttccctttgtattattcaccactgtaacttttattattaaaatgttgaacattcttgcacacatacattgttaagaatatatttttaggaaatattgtgaacattattaagaataatacacataacccagatttattaatattttaagattttgccatatttgcttcaggatttttcttaaattagttaacactttatagaaagagctggagctgtatgtgtacctctttcttcttccttagaggtagccattatcctgactttgtcatttatgattcctatggatgtttatagcctatttctacatggaagaggagggaacattactctagatatcaaacctagacaaagatatcataaggaaagaaaactaaagatcaatatcttataaatatgaacacaaaaatcctcaataaaatactggcaaacaaattctagaaacatataaaaggaattatacaccatgggtaagtaggatttattccaggaatgcaaagttagtttggcatctgaaaattaattagtataatatattgtatcaatagaattaaaaggaaaatgtatatgatctcaatagatgcaataaaagcatttgtcataattcaatactttccaagaatttatacaccaycaacaacccattaacctaggaatggaagagaacttcctcaatttgataaagagcatttataaaaagcccacagctaacactgtacttaatggtgaaagactagattattttctcttaagatcagaaacaagactctctgactgcttctatttgacattgtactggtggttctagtcagggcaatgaggcaagaaaaagaaataaaatgctccgagattggaagggaagaaataaagctatctctacttgcagatgacatgatgttatgtacagaaaaatcttaagggatccaccaaaaactattaaagtgagttcagtaagcttgcaggatacaagatcaaaatgaaaatatcagttgtatttttatacacctgaaataaataagctgaaaatgaaattaaggaaacaattctatttgcagtagcaccaaaaataataaaatacttggaataagtttaacaaaagtgtgtaaaacatattatctgaaaactataaaacattattggagaaattaaagaggatctaaagaaatgaaaaaaatgttccatgttaatggatcagagggcttaatatggttaagatggcaatactctccaaactgacctacagatttaataatatccctataataacaccagctgatgtccatagaaattgacaagatcagtctcaaattcacataggattgcaagggactcaaaatagccaaaacagatttgaaaaagaacaaaatacggggacttacactttcaaatttctaaacttactacaaagtaataataatcaattggtgcttatgcaatatggtagtgacataaggctgggtatatatatcaatagaatagaactgagagttcaaaaataaacccatacatctatggtcatctgattttcaacaagagtatcaagaccattcaatggggaaggaacagtcttttcaagaaatggtgctgggataactggatagccatataaaacataatgaaattggatccttacctcatgccatatacaattcaattggatcaaagacttaaatgaaagtgctaaaactgtaaaatacttagaagaaaacataggagtaaatcttcataaccttggatttagaaaaggattctcacatatggcaccaaaagcacaaatagcaaaagaaagctagatgaatcagacctcattaaaaacgtttttgcttcatagcagcagtccccaaccctttttggcaccaggaagtggtttcatggaagacaatttttccacacactggtgggtgatgtgggggctggttttgagatgcaactattccacctcagatcatcaggcattagattctcgtaaggagtgcacaacctagatcccacacatgtgcagttcacaatagaggtcacactcctgtaagaatctaaggctggcactgwtctgacaggaggtggagctgagatggtaatgctcgcttgcccaccactcacctcctgctgtgaagcccgattcctaacaggccatggactagcatctagccatggcctgggggttggagaccccctgcttcaaaggacaccttcaagaaagtaaaaagacaggtcaaagaatgasagaatatgtttgcaaatcatatatctgataagggatttgtatctagaatatatacagagcatgtacaacccaataataaaaagacaacacaactaaaaatggacaaatattgaaaaccggaacaccacaaggatgcccactctcaccactcctattcagcatagtactggaaatcctagccagagcagtcaggcaagagaaagacataaaaggaacccaaataggaaaagaagagaaaagtcaaactatctctctttgttgacaatacaaccctgtacctagaaaaccctgaagactctgccaaaggcttgtggaactgataaatgacttcggtaaagtttcaggatacaaaatcaacatacaaaaatcagtagcatttctatacaccaataatagtcaagccgagagccaaatcaaacaggcaattccatttacagtagtcacacacacaaaaaacacctaggaatacatctaaccaaggaggtgaaagctctctatacagagaactacaaaacactggtgaaagaaatgagatgacacaaacaaatggaaaaacattccaagctcatatactggaaaaatcgatattgttaaaatggtcatactgcctaaagcaatctatagactcaacactattcctatcaaactaccaataacatttttcacagaattagaaaaaactattctacaatgcacatggaaccaagaaaaagcccaaataaccaaatcagtcctaagcaaaaagaacaaagctggaggcatcacattacctgacttcaaactatactataaggctacagcagccaaaacagcatagtacagaaatagacatatagaccaatggaacagaatagagaatctataaataaagccacacatcagcagccacctgatctttgacaaggtcaacaaaaaaaaggggaaaggactccctgttcaataaatggtgctgggatagctggctagccgtatgcagaagaatgaaactgtaacccttacctttcaccacatataaaaattaactcaagatggattgaagatttaaatataagacctcaaaatataaaaatcctagaagaaacctaggaaacaccattctagatataggtcttgagaaaatgtatgactaagtccttaaaagcaattgcaacagaaccaaaaattgacaagtgggacctaagtaaaagaaagagcttttgcacagcaaaataaactatcaacagagtaaacagacaacctgcagaatgggagcaaatattaaaactgcaatgatataccatctcacaccagccagaatggctgttattaacaagtcaaaaaactgatggtagtgaggccatggagaatagggaacacttatacactgttggtgggaaggtaaattagttcagctactgtggaaaacagtttgaagatttctcaaagaacctaaaacagaactagcattcaacctagcaatcccattactgggtatatacccaaagaaaagaaatcattctgccaaagacacaagcacttgtatgttcatcacagcactattcacaatatcaaagacctggaatcaacctaggtacccatcaaaagtggattggataaagaaaatgtggtacatgtacatgatggaatactatgcgccataaaaaagaacaagatcacgtgctttgcagcaacatggatgcagcaggaagccattatcctaaacaaattaatgcaggatcagaaaaccaaatattacatgttcttataagtgggagctaaacattagctgtatgtgaacatgaaaacaataaacaagggggactactggtggggaagggcaaaggttgaaaaactacctattggctactatgctcattacctaggtgatgggatcaatcatatcccaaacctcagcatcatgcaatatacctatgtaacaaacttgcatatgtatcccctgaatctaaaataaaagttgaaagtatataaaaaggatatattatctgattaaacatctctccaaaatagaatatacaagtgtcccataaatatatgaaaagatactcaatattattagttattagggaaatgcaaataaataacacaataagctactaatttgcatacattaggatggctacaatgaaaatgtcagataataacaaatgttgtcgaggatacacactgttatggtttgaatgtgtttgctccaaaattaaggtgtttaaacttaatggccaatgtgatgatattaagaaatagagcttttaagaggtgattaagccatgaggaatttgctccttgtgaatgtgattaaggcctttataaaagaggctccacatagcattcagttcatttgcccttctaccttccactatgtgaggacacagcgttcctctcttctggaggatgcagcaacaaggcactatcttggaagcagtgagcagccctcaccagacaacagaacctattattgcatttatcttggacttcccaacctctagaattatgaagaaataaatttctattatttatgaactatccagtctttggtattttgttatgacagcacaaatggactaaggcatggacaagcaggaattctatacactgctggtgggaatgtaaaatggtgtggctgctttgtaaaaacaatgtagcacttccttaaatgattacattcagagttaccatatgacccagcaattccattcccagatatatacccaagagagattaaaaacatattcacacaaaacttgaacctggaagtttatagcagtattcatcatagccagttcctcaactaaaatgtggaaacaacccaagtgtaagtgaatggataaatagataaacaaaatgtggtatattcgtaaagtgaaatattgccaggccataaaaagaaatgaagtacatactgatatacatactttcagatccaaacacaagtatgtgagaattctgttgttccagactttaccaccacttcacatcatcagacttaaatttttgcctctctgacggatgtgaaatgtatctgttttgtacttccttgactattaaggctgaatgtcttttcatgtttattgactatatgagtttttttttcttccataaatatcctgttcacatgttttaactatttctttttctgcattgtttgtcttttctaattgatttactggagtatttggagaccccaacctgggcactaggggttcacatagctccctgcttgtccttgtttctaggcctttttgtgaactacggtttttactgatgctccaaattcacattcaggcatagggttttaaaataaatgtgttaaactcatatctccaactcctttccctcatacacacaatagttttagaataacaatgccatgtgttctacaataataagagaagtgaaaattatttaagagcatttgccctattgtttttctaattctaaaagaaatacatatttaatatggaagagttataaaatagaaaaatcataaagaacaaaagttatttataatccartaacccatgtattatcaatgtgaacattttggaacatttgttattcttgaaaatggtttagatagtaaacttttgaatacaatgagcacctgtcccattatgtattttaaatgggagaataatgatgtgttctcagcttatataaaagtcccgaaccattcttcaaatattactaaaatattcttaagcatctatagaaaaattgactggaatttctgcaaacttaaagacattttaaacactgttgagttaacatttgctaaaatcataggggggtatatttgtatgttttatgaaacaatgttgcataacattggaaattaaaattgtcttttgcattgcaaagaacatgtactataatgtaaatcaaattattaaatatggttaggttgcataggaatgcaaataatatttagcaaaatgaaacaagtcaaagcaatttttaaacaaaatatttaattgtcaactgaatagctgcctgaatgtggtgggtaaagagaaatggaggacatagtctgttcctgtttgcggggtgaagggttggttggtggtggcttaagagacatgtgagtgaactggagatgggatgaataaaacagtaaatatattatgtttgttcttatttaaattcaagaaaccagatgttcaggcttctcttgttgcactcaagacatcagaagttggtgtctattttccataattcattaaagagaaatgtgcaacctcactcttagatttgcagtatctttattccagagaattctctttccttgatggagacctacacaatttcttttttgttcaatctatgaaattaggatcagccaggtggtcagcatgactaattttacttcttatacaagtagcattaagggaaatgaatgcctaggttttcattttctgcagggcagatgctggctagttaagcttgcctgtaaatcatagtttgtccataaactccagcatattctatttagaaccacagagcgaaaaactaataaatacatttaaaaatcttagtagacattaactccagagaggttcttaatttttaacttgatcaaaattttagctatgtcttagtggtttggttgaattwtaagcagatattgagaactcgcattgctttataaaatgcttgggccgcatgtggtggctcacgcctgtaatccmagcactttgggaggctgaggcaggcagatcacttgaggcgaggagttcaagacgagactggccaacatggcaaaaccctgtctctattaaaaatacaaaaattagctgggcgtggtggtgggcgcctgtaatcccagctactcgggaggctgaggcacgagaatcgcttgaacctgggaggcagaggttgtggtgagccgagatcatgccactgcactccagcctgggcaacagagcaagactgtatctaaaaaaaaaattcttaatatgctttataaaaatggacattccataaaatagttctgatttgccgaacaaaacctttttagtataaaacataaaggcgtgggtgcattataacaggtttctttttcaagcaaggtttagagtaaagagatacaaaataaatggatctatatctacgttgtgtggtaatactctaattcctacttactcttggattggggtcctgttgaattctgaagtcttggtggggaaatggtattgatgccacttggaaggaacaggtccagtaaaagttttaataggatggactgcattcctctttctataaaaacatacccccaggaaaagggatcaaggtccattaacctaatcaccatttccacactgtgagaagaaaataggctgttattttttattttttgccacagtgattagtttaagctctcacactctgggtttctgaggtctaatgtctgtttccatgggaacggcagtggcaggcagctgctaagttgttagacatctaataatctggggaagctcctgtctgaatgcaggccaagtttctccagcatcttgggtcatttagtcacaagtggctgtgcagcctgtagagacatcttggaatatagggagttgaaatacttgctatattgaaattatatatataatttttttattcatttaatggagaagcattgagtaagaagtgatttgaggccaggcatggtagctcatgcctgtcatcccagcgctttgggaggccaaggagggcggatcacttgaggtcaggagttcgagaccagcctggccaacgtggtgaaaccctgtctcttctaaaaatacaaaaattagtcaggactggtggtgtgtgcctatagtctgcactacttgggagactgaggcttgagaatcacttgaaccagggagacagaggttgcagtgagctgagatcatgccactgccctccagcctggccaacagagagagactctatcttaaaaaaaaaaaagttataaaaaasaagtgatttgaaaaagaaaaagggctttaggaaggacacagaatataaacaaatctcctgtcctcatgacacttaagatttatagggattcctaagtctcctgtactgcatactcaaaatgcagggtcctaagacttacaggaaatattatactcaaatgcactttcttcattcctgtcttgaccatctgtgctgaatcctcacctcttttcctattctgtgaactgggatgtataaacgaataagaaatgtaaatatcctggctgctaattccttgtaagtctagaaagtggttaggtatttgacttgtctcctctggttcttaccctggccattcttgttgctaagaaggaatgatgtctcctgcaaagagcccaccaaacacatttctaccctaagtagcctgctcaaaactcatcaaaagccctactaagaygttttgctgcactgaaccctttcattttatagtttcctcatttagaattccctttcacacgtccattcattcattcaacaaatattaagggtctactatgtgccaggcctggtagtaagaatttggtatagacataatattccttcaagaagcttaaagccaggcacggtggctcatgcctgtaatccccacactttgggaggccgaggtgggtggatcacttgagcccaggagtttgagaccagcctgggcaacattgtgagaccctgtctctataaaaaataaaacaattatctggatgtggtggcacatgcctgtagtcccagctactcaggaggcggaagtgggaggattacttgagcctggggaggcagaggttgcagtgagctgagattgtaccattatgctccagcctgggcggtagagccagaccccttttcaaaaaaaaaaaaaagcagcttagagcttgatgggaaaaagctattacaggaataaatgcaaaacttgttatacaataacaggctacgttatgtattatgaggtttctgtggaaaaagaataagggatataacctaatttatattggggttgggttcatagaggctattttctacagccaaaatccagatatagagtctaaaatacgtggagtgagatggacaagagaaagaaagtgtcttgaattggttttttcccccattgtctcacatctctttttgcctttgcagtcacatcaattgagcatctttatggtggcccatttgtgctctttcatcagtttatgtcttcggttgcttaacagattcctctttgaggaagctgagattatgggggagggtttgagagcagcgatataggcacttagcaagaaaataacaacctacaggagcctgtgtgttataggagccttacagacagcaagggtgcataaagtcaatgttgagatggctaaggcaggcttcattgagaggaaaggacataggctcggctaagaaatttcttctctatccactgttatgttctgaaccagcagctatcaggtccagaggttttctagctgtaccctcttctctcccctgtggcagggcagatgtagtatccagggtggcctggctgcaggtcaccaatttagaactcatatgatggtccttggcaggtgcatggcaacgtaatccattcaatcacattgcacagtgataagtcactgcatgtgcgacagcagagaatgagccccgcctgggaaatagcctgtatctttccacttgtcctgactgattaacaatttatgctgcatgagtagaaaataattttgacctcattcactttattgcttgtgaaatcatggcagtatccatagactttttgcttaaacatttatattagtaggcatttttgtgttttcacatggctgcatgaaatgaacaggcacttttctaatatgaacatacagtgaatgaattaataactgtatgtttctaagagccacatttctgttagaactagccatataaggcatatgactaatgaattcagatatttaatattgaagtttaggaaaatgtcatttccactgggctgagaattagagtcaggagcaaatcttyctatctccctctyctacacattcattcattcagcattgtgtgcctattatatgtcaagatagtataatgtatatatttaatattatatatagtatagtataatacatattggcacataaatatgttttttatatatatataatcatcgayagtaacatgtttataggcaatagcaattcaatgtggcaagttttatgacaaggccatacacaggatgctatggagcatggaaaggaaggagtccctgagaacatgtcatcgaaactgacttcaaatggagatgtaggtatgagctggttgttagaaacggaatgtttgtgtcaccccgaaattcttgtgttgaaaccctaacccctagtgtggctacatttagagatggggcctctaaggaagtaattaagtttaaatgaggtcatgggagtggggccccaattcaactggattagtgtcctcataagaagagacatcgaaagccagctctctccctctctgaacatacacacaaacacgaggccatgtgaagacatagcaagaaggcagctgtctgcaagctgggaagagagccctcaccagaaactaaatttaccagaatcttggagttttagcttctgaactgtaaggaaataaatgtctgctgcttaagccaccaagcctgtggtattttgttatggtagccttagcaggctaatacagtggtaaactctgcatatggaggagttgaaaaagagagagtagatggcaatttgggcagaaggggaattacctgcaaatgttcaagggagtggagataattcttcttaaactgtttatcagtccttcaggagataagttaacaacagaggataattatcccagagarctggtttctggcaaatgtctgaagggcatggtaggtcataaaatacccactggtggtattttatattctgaaaaccattttaatctacctttcatgacctggatgcttcagcctcctgtgcttcctcagaatttgataactgacccatgagacaaaaactgatcktttatctagaatcctctagattccagtacaactcagcagctgtgaagcctctaaatttgcaacttgctttcttttaaactcagtagaatccctcagccagaaccaatcctcatgccaattttagaactgttcgatattcccaagaaaagaaaatggctggtgattgtcaactctcttaagaaagtctcttattttgggggggtggggtgagggggtgggggatggactctcactgtgtcacccaggctggagtgcagtggtgtgatcttagctcactgcaaactccgcctccgggttcaagtgattctcctgtctcagcctcccaagtagctgggactacaggcacacgccaccatgccctgctaatttttgcatttttagtagggacagggtttcaccatattggccaggctggtctggaactcctgaccttgtgatctgcccacctcggcctcccaaagtgctgggattacagctgtgagccaccgcgcccagctggaaatgttcttttgactctgaaattttagttcatcgagtccwcattgacttcacagctctctggtatctttaagtgtattatttttgtaatttatatgcttttttttcctggttactagcaggaacattgatccaccataaccaatttcatgtttctgagaagtgaagctcattttctgttaaagagaaagagagacatgaattccaaaacaggtaaaggtgtctataaaccagtaagtttattttagataccaagcaaaattctagaacttattatttataaggcagatggagagttattataaagggcacagtaaaaaatgtctaacataggattatcgagagcatatcatcactaaatagttctattttttttgacaaggctacagaaaaatagataatgtctatctgaaattcagaaagacatttgacaaagtttttcataatatccttattgccaatataacgagatgtgaagttaatactaatacgttcagatggatttagagtcaaaagattttattttataactttttaaagagaacagtgtgagtttgaagacatgtttctgtgagtggagtacaaagcttgttatcaaggaaactgggtggattttaatcaatgagtttgatagagacagagcacacagatcatgtaaagttggagagaatgccagtaaattgaaagacagaatcaagaaccaaggtatcttctgtaagctgcaacaaataacacttaatgggtattaatgtcatatcctacatttggataaaataaaaactgttaaaatgcaggctgagaaagacatggcttaataagaatatgtgttttaaaaagccttgggaagtattgttggcttgagctcagaatgagtcaacagggtgacatggccagcaagaaggccagtgggatttatagcaatgctgagaagggcagagggtgcagattgaatatattgcactggtgagtgcattatcctgaatactgcatggacgcgtgctgttgcattctgctctgagcatcatactttaggaaggaggaccatatatgaagcttgccagaggaaagtaactaggatataaagcatgagggaatgtaaagacatgtcaggaaaagagttgaaggataagagagtgtctaacttgggaaagagaggctttggaagatggaagaggtatcttccactgcataagggattgctttgttattgaggtcagagctaggacagaaatatagagaaaaaggttttattgctaaagtgcagaggaacattttcaaaatagtgataggtatgtaaattttgaattttgaatgagaccacttagcgtagtgatgacgatttaggaatttttttttttttttttttttttgagacggagtctcgctctgtcgcccaggctggagtgcagtggcgggatcttggctcactgcaagctccgcctcccgggttaacgccattctcctgcctcagcctcccaagtagctgggactacaggcgcccgccactacgcccggctaattttttgtatttttagtagagacggggtttcaccgttttagccgggatggtctcgatctcctgacctcgtgatccgcccgcctcggcctcccaaagtgctgggactacaggcgtgagccaccgcgcccggcccgatttaggaattttaaatcaggaaaaaatttaatattggaccctcttgccacttacaagctctatgattttacctaatcttttggattctcagttttttaaatctttaaaatgagaataatagtactgtttgttaagggtcattaggtgatcaaaggaaataattcatataaagtgcttgccatggtgaatcacacatttctatatgcttaatatgtatgaactatgtttaagttactgagatgtggtcagaaagaaaagcaagcacctggctgggcatggtggctcacgcctgtaatctcagcactttgggaggctgaggagggaggatcacttgaggccgggaaattgagaccagcctgggcaacatagcaagaccccatttaaataatatataaaaagaaaagcacttgccccttacattggcaatagttttattgcaggaagtaggaaactaaaccccaactcagaatttagacttgctgccagaaaggtaggtgccaggggagctgatgtaatcaagtgtcaccaattagagtctacagatcatgaaaagtaattctaggagattttcaaatgccttttttaacctagatcttctgcttggatgaattcatactatgaatttaggaaacatcaattcatttattccttctaggtggccagcattttaacaaaattacacatgtgtatacaagcatgcatcctggatttggtgagcacacataatttcaaatattctactctttgttccttaacatacattatcgttttaagattgatttggctggaaaatacaaccacagtttatgtatgtcacattctttttttttttttttttttttttttgagacagagtctctctctgtcgctgccaggctggagtgcaatggtgcaatctcagctcactgcaacctccggctcccgggttcaagcaattctcctgcctcaacctactgagtagctgggactacaggtgccaccatgcctggctaatttttgtatttttagtagagatgggggtttcaccatgttggccaggatggtctcgatctcttggcctcatgattcgcccgccttgcctcccaaagtgctgggattacaggcatgagccaccgtgcccagcctatgtcacattcttgtggtactgagattgtcaaaattcttttctgttaagaagcatggttcaaacctactgtgaggtactattttgcactcacaagttctgcaaagattgatgtaataaatggaaaggatatagggcaatggtaacttgaaactgctgttgggagagtaaattggaatattcattgttttactgctctaaatgttctcatcacacacaaaaaataagtatgtaaggtgatagatatggtaattattgtgatttaattgttctacaatgtatactatatcaacacattgcacaccataaatatatacaacatacatttgtcaattataaaagaaaaatattggcaggaaatattgtgtatagaatgatatatacaatatgattctacttatataataagttagttataaatcaatagttatgcctatgggttttaaaatatggagccaagacttatgtcttgtcttttttataatagccatcctaatagatggaaggtgatatctcattatgattttgatttaagttttcctgatgaattgtgatgttgagcattttttcatatacctgtgggccattggtatgtcttctttttgagaaagggctcagatcctctgcccattttttaatcaggttatttaatttttgctattaattctatacattctattagtttcttttatattttggatattaactccttatcagacatacggtttagaaatattttcttccattagtaagttgattcttcactctgttgattgcttcctttgatgttcagaagccttttagtttgatgtagtccactttatttttgtttttgttgcctgtgcttttggggttatatccaaagaaaacataacccagtccaacatcaggaagatttttccctgtgttttcttctgggagttttatggtttcaggtcttatgtttatatctttaatttattttgtgctaatttttgaatatgatttaacataaggattcaattttgtttttttgcatgtggatatccagttttcccaatgccatttattggagcaattatacttgttccattgtatattcttgctactattgtcaaagattggttgactgtatatatgtgggtttatttctgggctctcacttttctaaaactgggtatgataagacctaggtaactaagacggttgggtgagcctgaaagaagggaaagattgccttaggttaggccttatagcttaagaggcaaaaggaagtctcaagtctcctgtttgcttcagcccattaaccaggtttggagatcatacagaaaattaaggtttaagtgctaactagcagtgaaatgtaataaaaaactagttatgactctactgtggttttaaatggataaatgagatcgtgagtccaaasattcagaaactctgatactgttcatattgagagatttaactaaaaataagtttctgctggagagaagaatgaaaggtaagtacagaggaaggcaaggtacaaaggagattttctgagtccagtcagggttagcgtggagaccctgtgcacttggggaaatggaaaaagtggcaataaagagcaaattgtagatagaagcaatgaaggcccaaactggtaatgtcacacttttgctttgagcaggctggtaatgatttccccaggaaactcaactatgcaaataagaaagcttggaagtatgacttaacgattaatgaagctcacactactttgttcaatggaaaatttgttcttgtctaaatgtccagakagtaacttggttctttttctccagggttatgcagaacagaggagacgcttttctgccagctggaaggggtagcaggtggggtaatggattcccagcttgccagcggctgagattctaattagaatcttccttctggcttttagcaagcagctttcacttcatagtgtccttagagaagaaagttccatattcagcaagaaactgccctatttaaatgtataaaatctttttgtgtttgggctataaagcaagtggtcttcaaggttcatggcaagtatatcgtgtaatataaaaagcatcattagctcatgaaaatgctatttaaaaatgcaagtttgccttaggtaataaagttgaagaaagtagtctggaaatttaagacagaattgggaaacttaaaaatttagattttttagtttatatattgtatggattttaatatacacagatgaatggtgaagctggtagaaggagaaagaaaagagagatatggaggtgagggagggtgaaaatgtgcaatagatgatgacagtgttggagaaggcagaggtttttgccataaagaatctctagctgggatcacttgaggccaggagtttgagaccagcttgggcaacaaagtaagaccccagctctataaataaataaataagtaaataaataartaaataaataaataaataaataaatcagctgggcatggtggtgtgcatctgtagtcccaactactcaggaggctgaggcagaaggatcccttgagcctaggagttcaaggctgcagtgagctatgatgtgccactgcactccagcctggggaacagagcaagatcctgtcttttaaagaggaagagagagagactgactccattgggctttttctttttcacgttaaataaaatttaagggtttagttgtttagcctgtactgccttctcctggttggtcttggattagcagctcagatgtaacaaaagtgaactgtgtgaatggacccaactgtaacacagacgttatgtgccagattatgctgcctgcctgttgcagtttaccacggtgctggtaatatatccaggtcccattgggctggcttcaggccgtgatggtctttttttcatgagccttcctattgtgatactatgcatatattagtaagacgtcttaagtagaatacctattccaaaatggaatgaggcacatgtgtgcatactgaggtgcctgtgagttgcttacttctaaaagagagaggttacacaaaatcttaagcccttgtaatgtacttaatcttgtaaatgtgctatgggaacatttattgcaggcctccagagttgactttaatttttcttttatgacctgccaggagtagagtggagagattaaactatagcttccagaatcacagacaaatctgagttcgaagaaaaggtgatcctttctcagtgagaattctcttgcttaatagtcagagagattttgggaaattctgagagtgatgcctataaagtgaaagaaaaggaggagactgagaaaaaggaaacagaaaagcaaagttattgatttttgagcaggtaaaaccgaaaaactcattctatcaattatctatctgtctgtctgtctgtctgtctatctatctatctatctatctatctatctatctatctatctatctatcatctattgtgaaaggaactgctcagggaaaacttgcctcccatttctattcaaagtcatccttctgctcactgcgatagatgcatatctgattgtctcctttggaaaggctaatcagaaactcaaaagaatgcagccttcatctcttgcttatctgtggcctggaacccccgtccctgctttgagtcttcctgcctttgcttcaagttgtctggcctttccagaccaaaccaatgtacttcttacatatattgattgatgtctcatgtctctctaaaatgtataaaactaagttgtgccccgaccaccttgggcacatgccgtcaggacttcctgtgactgtgtcatgggcacgtcctcaaccttggcaaaataaactctctaaattaactgagacctttctcaaattttgggggctcacactatctatctatctatctatctatctatctatctatctatctatctatcatctatctcctacctatcatttacccatccatcgtctaccagttatctatatatctatctcattatgctgccagaaattgtataatattgggaacctatctttaaggaacttaaaaagatgaaaaagaatcaggaaatgctgatacaaaagaaataaatagagaatgaggagcagtgctggatcctggctctggctttctgttaagagtgtctgtgccttcagaagtgctggagcaggaagggttcatggacgtggctgggtcataagtaaaagtctatgtccaaatggtggaaacttgggaggtctaaccagtcaagaattgtaagcagctgtaggaaacaatacaagtgaagaccgaataagagctaagtaaaaacttggaaaaagcccctgtaatcccagcactttgggaggctgaggcaggcagatcacaaggtcaagagattgagaccatcctggccattatgatgaaactctgtctctactaaaaatacaaaaattagctgggtgtggtggcgtgtgcctgtagtcccagctacttgggaggctgaagcaggacagtcgcttgaacctgggaggcggaggttgcagtgagctgagatcgcgccactgtactccagcctggtgactgagactccgtttcaaaacaaaaacaaaacaaaacaaacctggaaaaagaaaaaaaaaaaaacagaagagggaatcagaaagttaatgtctgatcatatagggaagaggccagaggagcagcagggaaatcaatctgggttgaatctggcagaaaatgcatacagagagagaactcagcatgggagtttcttgtattttcaaatgacttctaattcctggttactccatgcacagaggttgtactcctggagagcttaaaggtaacaaatagctttgatggaatgtggctgcaaagatattaaccttcctacagaagagagattagcagcagacatgtgcctattgtgtgtgtgtgtgtgtgtgtgtgtgtataaaatcagtatgttcaaataaactgtctgggttgctgctttggtttgtgctaattattttgttttcaaagttttaggaaagaactccatttatattgttttaaagaaaaaacaaagattgactgaggtaaacttggagtaagtataggcataatcaaatagggtcccctagatcaaagctcaagcctgctggtttatcaatgagatgtctttgctaaagagttgattttggatcaggggctatgttcatttaataaattacaagtgtgaaaaagtcacagagatactataaagtgatctgattatttaatttttggaatataaagatatgggggagacttgtctcttgtttattataacagagcctagaattgaataaataccaactagtgatggtaacgtgaaaatcttgatcactgcagagattaaaaaaaccaaatctcatagctttacccagaggcctaataagggctaaaataactaattaaaaaaatgaataaaagccaagccaaaccgcgagaggatgatctaagttaaaatacgtgaccaggcaggttgcttcagtcgtagtagaaatattttaataagctaggagcaagatgaatatggagtattaataattgtaattttctttcatagttaagatatcagaaaccagtgagatatctcatagcctgtaaaagcagagcctctaattttaagagccaatttattttactataatttgagatgctggaaagacttttgagattgttatttaaatgccgtttgctattaaactgtggttagaaaatctgctcagccaaaatgatgctgaaagagcattaagtttatgagtcacaaaagccagagtaattctaattactttcctgaacttcagtacaatagagatgtttaatatgcaatgggacactcctttaaaattgttgcaagacaggtgatmggagtcttggcttctctccccaccttgattatcagtgaagtaaaggttaggtgcggtattgtattgtgtgttttcatcttaaagtttcttcttctgcagaatgggttaatgatggaaacatttgggtattgtggtgcacagagtgggttctcgtgtctcttcagagcaaagtcctcttatacatcatcatgagcctcataatgacgtttcggtcaatgacaactgcatatatgatggtggtcccctaagattacaatggaacagaatgcatagctgaagaagagccaagagaaaaggaaattgcaggagaagaaaaagaagaaaattcacagtgaagggtttagcagaagcttttgcagacctcaacaagcttcttaaaaatttgaaaatatggactccaacaccaaaagattttcattaatagagagaaatcttcagggtgcattatctgctcccaggcagataatctatgatgaaaaaaagaaacaaactaagaaaccatgatgaacatattcctgaaaaaagtgacaccttctcaggaagagcctcaggcaggtctttcaggagtatccagaagaaggcttgttatcacaggagatggcagcaccatgtgtgttttaacccctggagaccgtccagcaggacaagatgtggaggcagaaggcagtgctgttgatgatcctgaccttgtatggggttaggctaatgtgtgtgtttgtgtcttagtttttaacaaaaacgtttaaaaagtaaaggaaaaaaaatcttaaaaacagaaaagagcttatagaataaggttataaagaaagaaaatatttttgcacagctgtacggygtgtttatgtgttattacaagagtaaaaaggtttagaaaatttaaaaattgataaagttgaaaagttacagtaaactgagtttaatttgttatttaagaaagaaaaatattttctataaatctagtctagcctaagggtatagtgtttataaagtatacagtagtgtacagtcaagtcctaggctttacattcactcaccactctgtcactgactcacccagagcaacttccagtcttgtaacctccattcatggtaagtggcctatacaagtgtactattttttatcttttactctgtatttttactgtaccttttctatgtttagttatgtttagattcacaaatatttcccattttgttgtaattgcctacagtattcagtacagtaacatgctgtaccagtttgtagcctaggagcaatagactctaccatatagcctacatctgcaataggctacactatctaggtttgtgtaagttcactctatgatgttcacccaatgaagaaatcacccgagacacatttctcagaacgtatccctgtcattaagtgaaacatgactgtagttaagtgaggttataatggtttagaatgggtcctaaatccaatgactgatgtctttttaataggccagtaaaaacagagagagacacagaggtccacataggaacaccatgtgaagatggtggaagagattgaaatgatgcatctacaagccaaggaatgccaagacttatggtagttgtattattattagaattattttttatgctattattataattggtagtgtttcatacagtatttattgacctgacattaatatttgaccagttttattttttttctttcactgaaaaacctaggtccattcttctttttttcaagcatcattttgtatgagtatgttttagttgcttctattgtatatttaagacttgactccccaagaaataggaacacttttacaccgttggtaggagtgtaaattagttcaaccattggggaagacagtgtggtgattcttcaaggatctagaaccagaaataccatttgacccagcaatcccattactgggtatatgcccagaggattataaattctataaagacacatgcacatgtatgtttattgcagcactattcacaataacaaagacttggaaccaacccaaatgcccatcaatgatagactggttaaagaaaatgtggcacatatataccatggaatactatgtagccataaaaaagaatgagttcatatcctttgcagggacatagatgaagctggaagccatcattctcagcaaactaacacaggaacagaaaaccaaacactgcactttctcactcataagtgggaggtgaacaataagaacacatggacacacggaggggaatatcacacacaggggcctgtcggggggtggagagaaaggggaagggcattaggacaaaaacctaatacacacagggcttaaaacctagacgatggtttgataggtgcagcaaaccaccatggcacatgtatacctatgttacaaacctgcacattctgcacatgtttcccagaacttaaagtaaaataataaaaaaagacctgactccccattcccccaattttgtaatcaaataagagagtatttacctctttattgggaaatatatataatgcccatttttctaatatcaaagttgcagcttaaatatatatatgtaatacatatatttatattagaaatatagttgtactttacacacacacacacacacacacacacatacacacacacacatatattggagataagagtcttgatcaggctggactcaagcactcccgcactcaagttatcctcctgcctcagcctcctgagtagctgggactataggtgtgaaccactgcaccctgcttatagctgataatttaatatgaatttatcttagctaatctgcaaagaccctattgccaaataaggtcacattctgaggtttgggatagacataaattttttatatttgctatagttagtgttctttttttaatttatattaaataaatgcttctgttttgaagcatttatattattaaatgaatattatttatttattttttataaaataaatttatatattaaataaatgcttccttaaagtttctatatttcctgtctggcttccttgttgttatattgctaaacttgtttgggaaacatattttgtttccattccatgggtggttactcaaaagttttttcaactatgtttaacgtgatgttccaagggtttttttggggagtgtttccccttgacataagaagtttaggatacttttatttttacttctccagtaccacaacattcactcccttctctgaattctgtcttttacactgatactgttttgtaatttagatactgataattttactaacaatattatttttatattatatatcttctctttggggacatattttgctttgcattcaattttatatcaagacattaaaatttttcttagctttaatatgtatttttaactgatcttaaaggattctgttaattctgttctctcaatcagttggagtatatctttgagtaatttccttaaagagaagtatgtttcctgagctgttgcacagctgacttttttttttcttttttactttgaacttgaataatagcttgaattttgctccatttggttctggtgttttgtgttttgtttttatttttttagagacagagtctttctgtgttgcccaggctggagtacagtggcatgatcatagctcactgtaaccttgaactcccagactcaagtgtccctcctgcctcagcctatggaatacatccagctaattaattttgcttttgtagaggtagggtctcactatgttttccaggctggtcttgaactccaggcctcaagtaatcttcacgtttccgcttcccaaagtgatggttagaggtagctaaataaagaattctatcactgtcattattactattcaaaaatattacgacaatgtcattaggtataacatttcttcttattgatttttcttgggatagaaatcttttttgatttatatatactggatttctgtaaatttagattttcttctaatgattcacttattatatttcttgctggcttcttcagaaacaaatattatccatatgatgtctcctttttcttcatcttctatattgtccatattttctccaattattttaatctgtttatacctttattctatgctgacatatcttcttgagtttcacttttacagttttgatttgaatttcttctccatctatttttttccattaccctccatatcgattaagttacattaaattaagaaattatttctcttacgtttttcttgggttccttgtttttatgtttttcatatctcaactaatctttcttattgcttataaaaatcttgttctattatcaccttattcatgaaaaaactcaaaattctgttttctttagataatagcatatagtttcctaaaattcccttctgaaaacttttagagatctactttttggaagcaactctatttaacttaccccattatatttcttatttgttataattttatatttttccagtcaaagattggcaaaatatatttttgacaagcaaagattctctatacttatttttcattagaatgggtgtgtgtgtggcccttggtcacattctgtctattgatgtgatcttggaatttgtactttaaatccataattgaaaggctagttggtttgtgttgttcccagtttaattctcatttgtaagcaaatatcctcctagtgctcctttgttctagtgcagttttatcttctgagtgctggaaaacctctacttcttgagaagtatgtgttgttactaggatgttgttttttccctctgcatatattgctgtcttcttaatggaaagtacacctctctgaaaactctattctctattttctgcccatttgttctctggacttcatagaaccttcttctatgtggaaagatagtgggaaaaaaaatcatgcagtggtttgtatgaaaaactacaccttttgcctaacagcaatatctaagatgtggagagaaataattaacctgttttctggctagtacaggtgttggatccttgagtatggggacacatttacattttttgtgcatctgtttctatttcatgtaatgatactgtgtgaagtcaggaatagaattctaagtaggattttcctcaatttaacttctactgtcttataattaatttccatttatcctgcattttggctttgaattatctgtcagtgttagatttcagagtttttgagagcttcttttttttttttcctcttgggtacgcctttgtaagtatttaaaggttagttggaaagaatggtttggagaatgctacccagacactcttttggattttaagtctctctactgattcaaaatgctatttcagtaatctcagttgtaaatgtttactatttatttagagacaaggtcttgctctgtcattcaggctggagtgcaatgatgtgatcatagctcactgcagccttgaacttctaggatcaggtgatcctcctgcctcagcctcctgagtagctaggactacaggtgtgcaccactgagtgtggctaattttgtttattttttgtagagatggggtctctgtcacccagatgggtgtacaatggcacaatcatagctcactgcagctttaaactcccaggctcaagctaccctcctactctggcctcctttgtagctgttactatcgtgcacaccaccatgcacagctaagtttttctatttttttgtacagacaggctttcaccatgttgcccaagttgatctcaaaatcctaggctcaagcgatcctcttgccttggcctcccaaagtgctgggattataggcatgagccatggtgcctgtcttattcttttactgttgaggaaaatatcttcaaaaagctcatttaagaatgaaacatagtgtgagaattcatttttgagttgtagcatgtctaagaaggtatagaatttttggatagcatatttttttccggcagagttctagaaatgttactcctgtgtcttctagtgttttgtattaaggaaaacaaatgcatggccaggctgattattaatcttttgtgaagagtctaatatttttcatgttgatttttattcctttgtgaagaataaatatttttaagagtatttgtgggattctttcatctctgaaatttgatatttctatctgattaagctgtgtaagtctagttgtctagtttcttttcatgaggtttttcctaagcatcaaaaaatacgttcaaaattttatgctagtataaatttcagattgggaataatttttttgttatttctctgattattgattattttgttttctgatgcatactcttataggagataacatcttctagaattattcttcatgtatcttatcttctacctccttttgttcatgtctttatcttcttctgctaattctgggataatttgttgagtttatcttctccagcactcattcatttcctgcatatctttcttactgccatcatccagttagtttggcattatgttttttgacctcactsggacctttctaatttaagtcttcctttgtgaatatttcccagctacagagatgccatggcttcttgaacccttctggaagagaatctaatattttctaaaaatttcttctgaattttggagtaaccctattttaaaaggagatattccatcattttttaaaacaatgactcacttattttggacaccactattttctcatatactttggatttgctatttttaagagaaggaggctcaatgctgatattaatcaagtaggaattgaggtaggctaatgtttgtgtgtgtacttttcactcatttttagaaggacccttagcttcagagtccccagagtcttgaatgaggtgagaagtggaaattcagaaggttggaatgccctatatagtcatcacataaagttttaacaataccgcacatttatagatgaattactcaggaaattcattctcctctctatactgcctcatatatttctactccatgtcctcttctgcttatcttgactcccattccagagggaaatctcaggcagagtttctaatttttaaatttctgcctgctttggggctgccaatttcaggaaggtatcgctgagtctttcagtattgccagtggaatcgaactccagaaaaactcaaaggacaccacatggctatctccccagtgtccaatagcctgttcccaatgccattcccaactcttctaaattcatctggggcttaatagactctccccatcccaactcttctaaattcatctggggcttaatagactttccccctcatagacttccatgataagctgctctgtttcacaatagggaagcttacacaggcctttccttcaatctcatcctgccctccctagctaacagaaattyctagaaatatctagccagtgagagcatccatttctagtttcatcctataatgttggttttcataatgttggttttaaatgtaattattcattacaaagtatttgtgagggagtagagaagaatgggtacttataataaaagcatgactttttaatgtatcaaaactatacagaaacaaagacaacatagagataactcttgaagaagacagaacatcaacatcataagccccatttccttattttgaagtgtgggtcttctattcaatttctacaatagatttcaaatgtaatatttgataatgaaggtgatgataacaatgatattgatgataagagatgatactgatgagcacacttaagtgcttaatttatgataataatcattgttaacattcattagccttattgtatatcaggcactgtgctggcttctttacacacatgatcccagtgaatctctgtaacaggcctataagagagacacataaatttatcctcaccttatatatgaggaaaccaaggaacagactagttaagtaaggtaccagaggtcacacagatagtaactgacagaactgagacttgaatccagatcagtctggctacagagcccatgttcttatctactgtctgattaaaaataatatgacacatgacaggtacaagttacatgagaattcctttgacatgtgaatgaatggttctttgaagacagagtgcagtaaattccagtctataaaagagttttttgaataatatgatgaccaaacttgtgtgtccagggcaaaaggagggtacaaatagacagaatatgcaagatagagwaatgctggagttaagtctcagatatctttgaagcaagagtttcatccttaatttgcttggtgggcatgtgtttcttacatataagatttttatgtttctgaagcccagaggataagatggagaattcagctcagggttggcctaagggagggaggtgaactagcgagaaagaaaaaggtcccataagacaccccaggaagaaccagactactgaggaagattcagactgttgaatattatgttaatgaagacaactgagtcactctatgcctagtgtttatttcttttgtacttaaagattccagtgttttctagtaaaaataacatgtctgtactaaagggacaggttggcaggagaaatcattaatgggagatggaggatggccctggactatgtgtgtgtgtctctgtcaagtcgtggtgggaacccaggggaaaggctttatgtttgtgcagattttttattttgactcattctatgtattaagaaatatggagaagactacaggcatattttatcttataggttaaaaacaatgtaaatgaccttagaatgacttttgtgtgaggagcactttaaaaaaaaatagaaatctttagtatccttgaacccctaatgtgattaggtctaattgtgctatcagtataaatatgaacaatcatggcattagaagctgtaattgcctaattatgacttgcactaatgtgatgatttttgttagatctgaatcctaactaataggactagtctgccaaatctgaagtcagaaataaaagtcaaatcaagtattattttgtgtccctgggtaaattcaccagtacaatttctccatgagctagagaccctggacttctggcttttctctgctatatatcttataccatcccactcaggatgtgggcacctgatcattcaatttaagtcattcgtggatgactactaaaggaaaatggcagtaaaggtattgaattagtgtggatttttattagcacaatattttattattctttaaaattttcctaagagctgattaacataaactctttgcagattgaaatcaatcctctcatcaggtaaccaacataaaaataatcagggcattcctgagggatcacatataaaactgacagaggcaatgaagtgtcctgcccactttccagcatgttccttatgatcacactgccttcctccgtacctgttttatctcacctgccaatgtttatttgtttcctggaggaaagtcttacaaagcacactccctaaatattatttgaaagtccagatgtacaggaacatttatttctcagcgagtgagttgtccactagtgcaagaagcagaggcaatagttcatctctctctgtctttggaaaatttggtgactagcagttaacactcatagagagaaaacaatgatgtatagaaagtccagcgtggaagactatattttctccactttcctggtctatttgtgatattttagttgcttcaacaatgactgaaataagactggttatacacaaggctgactgcttggaagcattctttgttcctgggttttaggtgtgtgagtgtgatagaagactcctcagagatcctccataataaaaccatctagatgacaaacagaatgatctgtacaacaaattctgaattataatgggtaaaatgaaagcaaactccagagtatttctttttgtgtcctacagcattagatattttgtctggtagccacatacgcaagacccaatctcgtttcagtctaataaattacataaagctatttttgcagtcaattagcatgctgaatgtttcaacttccacatgcgcattctctttcttttctacagtttgtaaactgctggagaggtgtgttaacattctatttcaatgtcacagtgagaggaagtggtgataatagaaggcaggggcaggacatgttgctttctcgatacttttttttctgtttttcttttttcttttttttaaagaggtgggacctctaaacagatgagtgttagctctaagtaaaatatagttctaagcatcacaattctgtgcttatattttaataggtagttggtgtttcctagggcggctataaaggtatcacaagctgagtggcttaaaacaacataaatttattttcttccagttctagaggttagaaatctgaaatcaaggtgttggtagggccatactctatctgaaggctctagggaaattcctccattgcctctttctagtttctggtggttgcaggctgtagctgatgttctttggcttatagatgcctcgctccaatttctgcctccatcttcatgtggtcatcttcctagtgtctctgtgtccaaattttcctcttcttagaagcacacccaatattggaattgagttcaccctaattcattatgacctcatcttaactttgttacattttcaatgactatttctaaataaggtcacattctgagatactgggggttagaactttcatgtcttttgggggaacaaaattaaatctgtaacaaatgacaaaatggaaagtttcattcttgcatttgctcagagaagggtccctaagggaatagttacccatcagatttagcaactttttcctagaagcctcatgagaggggtcaggatgaatgcacctgttctgcatataaggtaggcagccaccctccaatatcatcaaattcaacactttatagttaaaaaaaattagcccagaatcttaaataagctacaaagtttacaaacaactaatgatgaagaggctgagagtggattccactgttgcttgatttctggcctggagttcttccttcctgctcacactgtgggggcatgttgaggtgcacaatgcttctgtggttacccagtaggacagtgacagcttgggatgcctcctgtcacactgtgaatcttgtgaagttacttttaggccaccttgtgactagccacttcaaagtctttaaaagacaggaggtataaatgaaatgaataaaacaagagcttaagctattatctctcctctggggcatttgcattttaatggagcagcctgggctctgtcccagacctattgattcataatctccaagggagagtcctgggagaatctgtattttagagagcataccaggtgactcagatagttgggcatgtttaggaaacactggcacagagaaattctgacttctgaaatagtaagaaagaaatatttactggaaggattttaggtaagagccaggtggggatggtgggggaggaagggaagctactacttgatggcctccaaaaaacacgagtcagatgcataattctgtattctttgcccaaagtctgaggcctggtttctgccccaggaggaattcagaggaagcaggttttctgggcttggagtgtagtatccctcttaggagaagcaagagagatttaggattgcttatttattgcagaacccacgtcttcttgcagattgcaaagccaattctgaaactgcctttgcaaaaattaaaacagtgaggaaactatgacagtgaggagatctgtctaactaactcccatcttgccttttaaccttccaactgcccttcatcactcctgggctcaggccacgctaacttcgaaagacatttattttgtagtttaaatgataatagcccttctcccaaactaaaccaccttggtacagctgataaaagacaaccaggttaggaggatgagcaatctgaattctgctcaggtgttgacctaaaggattacccaccatgattccagaagtcacaagatttgcaaatcccccaattattgctgcagataacatctctggaactaagattggccttttgagatgttttttcaggtgtttgcatttctgatgaccaatagcttcacctggacctccccacgccctctgaccagtcctgtggccccacccagaagcggactccctggcccaccaaactattattgaaaaaccatagcctccgaattttctgggagatcggtttgagttattactctgtctcccacatggtgtggctggccttgtgtcaattaaactccttcttcattgcaatgctgtggtctcctgagttggttttgtctatgcagtgcaggaagaatctgttggctggttacaattttatattaagggagggtacccaagagaaaattctagcccatttctattgcttcatttttcacattgcatgcagtcagtggtgatgtactttctctctctctttttttagagagagagttcctttttttttttttttagagagttcctcattacttgttttgaacctaaasttataatttagtgtctgtgacagcacatttgattgtttttaaatgaaggtgataggaaaggcagaagaatgactagggaagaaaatctggagaacagatgacaagataacattgcttttgattctctgcaaacaagcatggtattgaaaaatgatccaaaatcgtttgcttgagcaccacagttacttttgagtaatatttttgtgagatacttttaaatttatttttttgaagtctggtgctctgaaattgaatttgaagtcagcttaataccaaagtgtgacacattctctttcagcaggctttactgtatctcacgtctatttagtttttacaaatttagttttcatgatttctgcatctttggaatacaaatcctgggatggtttctatctgaatggagtcttcagtgaatggtgacatggtttcctttattttttcctatttcttttttttttgagacagagtctcgctctgtcgcccaggctggagtgcagtggtgcgatcccggctcactacaagctccacctcccgggttcatgccattctcctgcctcagcctcccgagtagctgggactacaggcgcccgccaccacgcctggctaattttttttttttttttgtatttttagtagagatggggtttcaccgtgttagccaggatggtctcgatctcctgacctcgtgatctgccctccttggcctcccaaagtgctttatatcttctgtcttgattaattttcttcctctttggtaacacctgttgtctcttacggaccaaccctgtgctagggctgaggcacaaggagctctaagaaccaagctgtggccgggcacggtggctcaagcctgtaatcccagcactttgggaggccaaggctgtcggatcatgaggtcaggagattgagaccatcctggctaacacggtgaaaccccgtctctactaaaaatacaaaaattagccgggcatggtggtgggcgcctgtagtcccagctactctggaggctgagacaggagaatggtgcgaacccgggaggtggagcttgcagtgagccgagatcgcgccactgcactccagcctgggcgacagagcgagactcactctcmaaaaaaaaaaaaaaaaaaaaaaaaaaaggaaccaagttgtgagtgagaaggacctggaaaggcactgttagtggcagtggatccgtaggggtctgcaggaacctcaactcttgcgtcctcagaagaattcgacggaggaggcatgaggcagaaggagagacagaggcaagttttatagcagaagtgaaagtttatttaaaagctttagagagcaggaatgaaagaaaggaaagtacacttggaagagggccaagcaggtgacttgagagaccaagtgcgctgtttgaccttgacttacggtttagtatattggcatacttctggggtcttgtgtccctgatttcctgatttttccctggagggtgcgccgtctgtatgcgcagtggcctactagcgtttgggagaggccgtaggcgcagtgtgtttactggagttgtacgcrtgctccctagagtggttcttcccttcccggtctagcattcctaggggaaagtgatgtaccagttaagctctgctgttttgcctcttagtgctcatgcttgagcccactcgcccaattcctgaaatcttagggggaagcggctgatcaccagtttcagatttttcctatgtattgtgagactgcctttccctggcacaggctgcaactaattattattttagagacacagtaaacaaccacttgatcatcacctgatggtcagctggtgtgtgtatgggggggttgggagggccctctcctgccctgctcatgtgtgattagctacccagtttaacaggaccatgttattgcatcattaaaagtgaagtattatgccctatgtcaggagggtagaggtgcacagataaggtcagtggaccccagttaagggggcagggaatacttcctggaataaattacatttgagctgaaacttgaaggatgtatttaggtgatgtagacaagtggttggagcagagatctcatctgtacccacatactccaccttccctcttgctgcaattgattatctactcccatgtaagacaagcccttgacttatacactacctctcatcctctgatattttcaagtagctcattctgcagttggctcttcatcctgcagtggcaatttttactatttacatggtcttttgcataaacatgcaatattttctttctttgaaagcaaaacaaaactcccttaatccacattcacctccagtatatgtctcatttttctgttactctacagccaaattccttgaaattgttacttatattcacatctccatttctttgcattgcgtacttcctgaagctcattgcaattatagtttcatccttgccatttcactgaaatcactcttgtcaaggtcacccactgcctcccataatgccagagtggtcaatttttagtatccttactgtgcaaccagctctcatgattgtacccagtcaaatctctataataaattatacatctctctacagacctggactgaaacattgctatttggtgttttaccctatttagagccaaaatatattttcataagaagaaactcacagctgtcacatgtawgtaagttataaactgatttcagaatctccaatacagaaaatagtaactttagtgttcctattgtttggtactctaataataattagagaaaactgagagtttgggattatgtgactacaggaaatacctgtaattgccaattggcttcataataagaaaattggcagggctaagaaggcccagggaattaagaatataaatgtagaggttaacatggagaactacttagcatgaaagaatatggatgtttcatttaatttttttcatatcaaaaatctctcttcttgtaccaatttctgctcattggcttatagcaggtacagttcagggactctagcattgattagtataagttcctaattttcaggtgaaggcactgaggcccaggagagtgaagggcttgaggtcaaacacccatgaatggagaaggcttctggccccctccaatcccctctgcatctcactaacaggactggaagctgctgaaacagaggtattggaagcccacagatcatcaatatacagtttgaacttgtagtgaggtagacaagaataattcatagggatgtattatagagtaggtagagaaggctgactcctgacagtggcatatttgataaaaatccycccaaaggcatttagtacctggtaggctaatggctcatgagagaaaacacaagaaaggagatgatatgggagggtgggaaagccaatctttaggtaaaaaattacaagtcgtctttaaactatttactttaaaaattactagtttttctgctctgcatgctaatatgctactctttttttctcaactttattatttctctttgaatgtatattagtccattcttacattgctataaagaaatatcggagactaggtaatttataaagaaaagaggtttaattgcctcatggtttcatagrctgtttgggtagcatggctggggaggcctcaggaaacttttaatcatggtggaaagtgaaggggaagtagggacgtcttacatgaccagagcaggaggaagagagagaagggggagatggtgcacacttttttttttttaagctttgtatctaatttggcaatcttattccagtatttttctttttctttttttttttattatactttaagttctagggtacatatgcacaatgtgcaggtttgttacatatgtatacatgtgccatgttggtgtgctgcacctattacctcgtcatttacattaggtatatctcctaatgctttccctcccccctcccccaccccatgacaggccctggtgtgtgatgttccccttcctgtgtccaagtgttctcattgttcaattcccacctatgagtgagaacatgcggtgtttgtttttttttgtccttgtgatagttttctgagaatgatggtttccagcttcatccatgtccttacaaaggacatgaactcatccatttttatggctgcatagtattccatggtgtatatgtgccacattttcttaatccagtctatcattgatggacatttgggttggttccaagtcttcgctattgtgaatagtgccgcaataaacatacgtgtgcatgtgtctttatagcagcatgacttctaatcctttgggtatatacccagtaatgggatggctgggtcaaatgatatttctagttctagatccctgaggaatcgccacactgtcttctacaatggttgaactagtttacygtctcaccaacagtgtaaaagtgttcctatttctctacatcatctccagcacctgttgtttcctgactttttaatgatygccattctaactggtgtgagatggtatctsattgtggttttgatttgcatttctcggatggccagtgatgatgagcattttttcatgtgtctgttggctgcataaatgtcttcttttgagaagtgtctgttcatatccttcgyccactttttgatggggttgtttgtttttttcttgtaaatttgtttgagttctttgtagattttggatattagccctttgtcagataagtagattgcaaaaattttctcccattctgtaggttgtctgttcactctgatggtagtttcttttgccgtgcagaagccctttagtttaattagatctcatttgtcaattttggcttttgttgccattgcttttggtgttttagacatgaagtccttgaccatgcctrtgtcctgaatggtattgcctaggttttctcctagggtttttatggttttaggtctaacatgtaagtctttaatccatcttgaattaatttttgtgtaaggtataaggaagggatccagtttcagctttctacatatggctagccagttttcccagcaccatttgttaaatagggaattgtttccccatttcttgtttttgtcaggattgtcaaagatcagatggttgtagatgtgtggtattatttctgagggctctgttctgttccattggtgtatatctctgttttgktaccastacyatgctgttttggttactgtagccttgtagtatagtttgaagtcaggtagtgtgatgcctccagctttgttcttttggcttaggattgtcttggcaatgtgagctcttttcagattccatatgaactttaaagtagttttttccaattctgtgaagcaagtcattggtagyttgatggggatgtcattgaatctataaattaccttgggcagtaaggccattttcatgatattgattcttcctacccatgagcatggaattttcttccattcgtttgtatcctcttttatttcattgagcagtggtttgtagttcttgaagaggtccttcacatcccttgtaaattggattcctaggtattttattctctttgaagcaattgtgaatgggagttcactcatgatttggctctctgtttgtctgttattggtgtgtaagaatgcttgtgatttttgcacattgattttgtatcctgagactttgctgaagttgcttatcaactgaaggagattttgggctgagacaatggggttttctaaatatacaatcatgtcatctgcaaacagggacaatttgacttcctcttttcctaactgaataacctttatttctttctcctgcctgttattatgttgaataggagtggtgagggagggcatccctgtgttgtgccagttttcaaagggaatgctttgagtttttgtccattcagtatgatattggctgtgggtttgtcataratagctcttgtttttttgagatacaccccatcaatacctaatttattgaragtttttagcatgaagggctgttgaattttgtcaaagggcttttcttcatctattgagataatcatgtggtttttgtctttggttctgtttgtatgctggattacatttattgatttgcatatgttgaaccatcctcgcatcccaaggatgaagcccaggtgatcatggtggataagctttttgatgtgctgctggattaggtttgccagtattttattgaggatttttgcacaaatgttcatctgggatgttggtctaaaattctctttttttgttgtgtctctgccaggctttggtatcaggataatgctggcctcatgaaatgagttagggaggattctctctttttctattgattggaatagtttcagaaggaagggtaccagctcctccttgtacctctggtagaattcggctgtgaatccatctggtcctggacttcttttggttggtaggctattaattattgccttaatttcagagcctgttattgatctattcagggattcaacttcttcctggtttagttttgggagggtgtatgtgtccaggaatttttccatttcttctagattttctagtttatttacatagaagtgtttatagtattctctgatggtagtttgtatttctgygggattggtggtgatatcccctttatcattttttattgagtccatttgattcttctctcttttcttctttattattcttgctagctgtctatcaattttgttgatcttttcaaaaaaccagctgctggattcattgattttttgaagggttttttttgtatctgtatttccttcagttcttctctgatcttagttatttcttgccgtctgctagcttttgaatgtgtgttctcttgcttctctagttcttttaattgtgatgttasggtgtcaattttagatctttcctgctttctcttgtgggcatttagtgttataaatttccctctacactgctttaaatgtgtcccatttaaaggtgatttggggtggagagttctttagatgtctattaggtccacttggtgcagagctgagttcaactcctggatatccttgttaactttctgtctcgttgatctgtctaatgttgacagtggggtgttaaattctctcattattattgtgtgggagtctaagtctctttgtaggtctctaaggacttgctttatrtatctgggtgctcctgtattgggtgcatatatatttaagatagttagctcttcttgttgaattgatccctttaccattatgtaatgaccttctttgtctcttttgatctttattggtttaaagtctgttttatcagagactaggattgcaacccctgcctttttttgttttccatttgcttggttgatcttcctccatccctttattttgagtctatgtgtgtctctgcatgtgagctgggtctcctgaatacagcacactgatgggtcttgactctttatccaatttgccagtctgtgtcttataattggtacatttatcccatttacatttaaggttaatattgttatgtgtgaatttgattctgtcattatgatgttagctggctattttgcttgttagttaatgcagtttcttcctagcatcagtggtctttacaatttgtcatgtttttgcagtcgctggtaccagttgttcctttccatgtttagtgcttccttcaggagctcttttagggcaggcctggtggtgacaaaatctctcagcatttgcttctctgtaaagaattctgtttctccttcacttatgaagcttagtttggctggatatgaaattctggkttgaaaattcttttctttaagaatgttgaatattggccccactctcttctggcttctagagtttctgccaagagatctactgttagtctgaagggtttccctttgtgggcaacccgacctttctctctggctgcccttaacattttttccttcatttcaactttggtgaatctgacaattacgtttcttggagttgctcttctcaaggagtatctttgtggcgttctctgtatttcctgaatttgaatgttggcctgccttgctagkttggggaagttctcctggataataccctgcagagtgttttccaacttggttccattctccccatcactttcaggtacaccaatcagatgtagatttggtcttttcacatagtcccatatttcttgaaggctttgtttgtttctttttactcttttttctctagacttctcttctcacttcatttcattcatttgatcctcagtcactgatatcctttgttccagttgatcgaatcagctactgaagcttgtgcattcattacatagttctcatgccatgtttttcagctccatcacgtcatttaaggactcctctacattggttattctagttagccattcgtctaatcttttttcaaggtttttagctttttttgcaatgcgttctaacttcctcctttagcttggagaagtttgatcttytgaagccttcttctttcaactcgtcaaagtcattctccatccagctttgttccattgctggtgaggaactgtgttcctttggagagggagaggcgctctgatttttagaattttcagcgtttctgctctgttttttccccatctttgtggttttatctacctttggtctttgatgatggtgacgtacagatggggttttggtgtggatgtcctttctgtttcttagttttccttctaacagttagggtcctcagctgcaggtctgttggagtttactggaggtccactccagaccctgtttgcctggatatcagcagtggaggctgcagaacagtgaatattgctgaacagcaaatgttgctgcttgattgttcctytggaagcttcatctcagaggggtacctggctgtgtgaggtgtcagtctgcccctactggggagtgtctcccagttaggctactcagggttcagggacccacttgaggaggcagtctgtctgttctcagatctcaaactccattctgggagaaccactactctcttcaaagctgtcagacagggacatttaagtctgcagaggtttctgctgccttttgtttggctgtgccctgcccccagaggtggcatctacagaggcaggcaggcctccttgagctgcrgtgagctccacccagttcgagcttcctggctgctttgtttacctgctcaagcctcagcaatggtgggcgccccacccccagcctcactgyagccttgcagtttgatctcagactgctgtgctagcaatgaagggggctccgtgggcatgggaccctctgagccatgtgtgggatataatctcctggtgtgccgtttgctaagaccgttggaaaagggcaatattagtgagaggtgacagcatgctggcagccctcacagccctcgctygctctcagcacctcctctgcckgggctcccactttggcagcacttgaggagcccttcagcccaccgctgcactgtgggagcccctttctgggctggccaaggctggagccggctccctcagcttgcagggaggtgtggaaggagaggtgcgagcggcaaccagggctgcacagggtgcttacgggccagctggagttctgggtgggcatgggcttggtgggccctgccagagggccctctcagagtggccacctggccctgccagccctggggaatgaggagcttagcacccggaccagcggctgcgcagggtgtgctgggtcccccagcagtgccagcccaccagtgctgtgctcgatttctctccaggccttagctgccttcctgtggggcagggctcgggacctgcagcccgccatgcytgagtcccgcccccacccccacgggstcctgtgcagcctgagcctccccgacgagcgctgcccactgctccatggtgcccagtcccatcgaccacccaagggctgaggagtgtgggcgcacagcacaggactggcaggcagctccaccagcagccccagtgcgagatccactgggtgaggccagctgggctcctgtgtctagtgggaacttggaraacctttatgtctagctaagggattgtaaatacaccaatcagcactctgtctctagctcaaggtttgtaaacacaccaatcagcaccctgtgtctagctcaggttttgtgaatacaccaatcgacactctgtgtctagctactctggtggggacttggaaaacttttatgtctagctaagagattgtaaataacaccaatcgacactctgtatctagctactctggtggggacttggagaacctttgtgtccagctcagggattttaaacacaccaatcagcaccctgtcaaaacagaccactcggctctctgtaaaatggaccaatcagcaggatgtgggtggggccagataagagaataaaagcaggctgcccgagccagcagtggcaaccrgctggggtccccttccacactgtggaarctttgttctttcgctctttgaaataaatcttgctgctgctcaatctttgggtacacactgcctttatgagctgtaacactcactgtgaaggtctgcagcttcactcctgaagccagcaagaccatgaacccaccgggaggaatgaacaactccagacgcgccaccttaagacccgtaacactcaccgcaaaggtctgcagcttcactcctgagccaaagagaccacgaacccaccagaaggaagaaactctgaacacatccgaacatcagaaggaacagactccagacgatccaccttaagagctgtaacactcaccgtgaaggtccgcggcttcattcttgaagtcagtgagactaagaacccaccaattccggacacattagggtgtgagtgacccgattttccaggtgctgtctgtcacccttttccttggctaggaaagggaattccctgaccccttgtgcttcccgggtgaggcaatgcctcgccctgctttggctcacacttggtgtgctgcacccactgttctgcccccactgactgacgagccccagtgagatgaacccagcaccttagttggaaatgcagaaatcaycygtcttctgcgttgctcacactgggagctgtagactggagctgtttytatttggccatcttggaaccaccttcccaatagtacacatttttaaacaaccagatctcatgagaactcactcactatcatgagaacagcaagggggaaatcagcccccatgatctagtcacctcccaacaggtccctcctccaacattggggattataatttgacatgaaatattggtggggacacaaatccaaaccatattagaatatatgcacaggaaatggcctaaagatgtcatatgcccttggttttacttagagtttgaaaatcaggttatgaggtcacttatttcagacagtagttcacattatttaactatcctctgtcacttttagagtttttattttattaaaggctttaattggtaatactcatttctttttcttttattagcattgattttactttctgtagaaatacagaaagcattttcaaatgctaattttattatgtctgtatctggtagaagattcaaaacattgctccaaaaacacttggcagcaaattccccattcactggcaacctgaaatrtaagtttattgagcatgaatgataattcgttatcagatgtaagtcttggctctaattacaagatgcttgtagtccaacatgtagtctaacaccttatactctgatcaagtataagaaagaggccaatttactagtagaaattgcaacaatgaataggaaaaaaaatgtacgctgcaaagcagagcactgtgagagaagaatgtatggtatattcatagtggttgagggggagaggattaatagcttttggacatattacagaatgttaattacatgcaaaacaaaatagttctgtatagggaagtgtgaatgctgtacatagcatgtgactagcttgcatttaatggggaaaagaatttaactagataattagtatatatcaaatgcaatttatgtgtcagacatcatgctatttatgtattttacacaattattatcaaaatgtaatacattaccaatgactagaaataatagttgaagaataakaatagtttcataaaaagtgtaggataattgaatcagagagagacattcagagaagaaaaacgttatgaaaaattttaagtagtagtttgaaggaagaaaaaagagttttccaaaaagaaaatgtctggaaatataaagyaattcaaaatttgagaagcagaggttttgctttagtaaggagagggtaaatagatatggctggtagagtgtaractgtgaccagagcagcgattctcttggcttataagaggaaactgctgggtaatcccaaagggccttgaattgttgatgaaatgtaagttctttgtggagttaattttggtcaaacattgaccaaaatgtttataaatttccttttttcgtggtaaaataaaattgtcttatgattgcttcttgagtgaatttttaaggatattaaaagttggtattccttaaaagttaaccttttacggttaataaactattgctatagtttattatggtctttgattcatttttctactaggttacttgagactgctacacaacatcaaaaaaattctaatgcacatgggcacaggtttattgtttgaattcccataaaaatttaaaacatsactgaaatggcaaagttgatttaacattaaatgtaacatatcacattaaaaatagaagatactaaagaaaaaatatacaaatattgtagtagatggaggaaaacttctctatgcattratgataaaaattatcaggaagttcagagtagaaggaaaagttttcaacctgaaaaaccatttttactaaaagcctacagcaaacatcatgcttgaagattaaatagtagaaacactccttttaaaatgaaacatgacagacatgcatatgtttttattttttgcttttttctctctttttcttgctctcccagtcttcctcttttttcttttttagtattatattggaggtctcagaatgctcaggaagacaagaaaacaaaaatatattggaatatgagcggaagactttttttgtcattacttataattgataaaattaacttcacagaaagtcctctacaacatacaggaaaactatttgaattagtatgaaagcttagtgacagtattggatatacaaaatataaatctcaattgcaaatctatacacaaggatgaaagattaggaaatatattttaaaatatattatttacaagagcagtaaaatatattaaggtcctagtaataaatcaaataaagatgtgcaagacctcaaagaagaaaatccagaaaactttattcaacaatgttaaagaagagagacagatcatagggagacacaatagcataaaggtccaaattctttccaaattgatatatagtctaatgcaatttaataaaaatcccaaacactaatttttatgagattagacaagctgattctaatatatacatggaagaacaaacggccaagaatagccaacatatgcttaaagaaacaaaatcaaggggcttataataatgctgctataattaagartggatgattatgtagatcaatggaatagaacagaaagttcagaaattgacatgttaatttagggaaattaaatattttgaaaaggtagcattgaatattagtgagcaaataattcttttattaagtcacctggtacaatgattatttatatagaaaatttataattggatctctacttcacatcatatatgaaattcaattccaggcagatttaggatttagatgtgaaaaacaaaactttaaaatatttagagaataaatgtttaagaatattttacagggtaggggaaaatttcttaagcaatcacatgtagcataatgtcaaaatggaaaggctgataaattagatttaaacaatctaattttaaattagatttaaacagtctaattttaaattagatttaaacagtctaattttaaattagatttaaacagtctaattttaaattagatttaaacagactaattttaaattagatttaaacagtctaattttaaattagatttaaacagtctaattttaaattagatttaaacagtctaattttaaattagatttaaacagtctaattttaaattagatttaaaaaattaaggccttttcttcgttcaaagatactttaaattttgtaaaaaataagcatcaaattgaaagaaatttgcaatacttttaaccaacaaaggattaatgttcagaatgtatgcataactcctatgtttcatataggagttagaaaaaaacgaagagcatacggaggatatggcagaaattttaggttttttaaaaattagatgttgtttggactgtatatacatttttttgttcctttataaaaaagtaacagctttgagatataattcatataccatcatacatttcctttaaaatgtataatttaatggtttttagtatatttacaattatgtaactgatagactctttgtgttccttagctcagctaggtctgagttcttgtcaaatgaccaggaagaattaggcacgtggacaccagagagtgagtggagtarrattaattaagcgaaatgaaaactctcagtggagagtgtatgtggggaagggggtggttcccctacctgaaggtgggaaggccccccaacctgccgccccatgtggctgggtctggggtcttttatggactcagaatggagagtgcatgctgattggtttgtgagtatgcaaaaaaggttaaaacaaagacaccactcagacgtgggcatgagagtgtagaagaccaattaggaaagggtaggtatatgtaaaatagatgaagggtgaggatcaatcacagaaagcatgacaaacaggaaaacaagttctcaagtcagtctgaggatttaacttgcagcttggttttcaggctttaagctctttggctcggaggtggggtttcaccatggagccacccctatctgcctaggtatttggctgcctcctgctactctgatagccaccaccacaatacattttagaacatttttaacaccctaataaagaaacttgggactcattagcagtcaatcccaatctcctcctccctaacatctccagccctaggcaaccactattctacttttctctatagattttcctgtgctgaatatttcatataaatagcaccaaataatatgtggtttttgtgtctggttcctctcacttagcataatattttcaaggttcatccatgttacagtacatatcagtacttcatttctttttattgctgaataatattccattgtatggatataacacgtttcttttccattcatcacttgatatttaatggtttccactttttgtctgttaggaacagtgctgtaatatacattcatgtaccaagtttttatgtggacatatattaataatttcatttctgctgggtatgtaactaggagtagaattgctgcatcataaagtwattctatatttaatctgagggactgttagacctgttttccagagtgatgatacyattttatattcccacaagtgtccycatggatacttgttattatctgtttcttaaattatggccatcctagtagatgtgaagtggtatctcattgtgattttctttggcatttctctagtgtctaaggatgatgagaaagttttcatgagtttaatggccatttgaatattgtctttggtgaaatatacattggttttaaataaacattgcttcataataacacaactttaaagataaacagaatgaggagaaaatagaaaaaaagttaatgtagataaytctttagataagctttgctgtgaatagaagcagtgaaaggagataattcaaaggacatgtgagttgaagaaaggcttgcaaatgttccggttcagcaatttcttttatgccacagtgataatagtagcccacagtcacagtctcagtgggcacagagtgagggaggcaaagtgagggacagaaatggggaaggaagaggaacacaggagggaactgagtttattgcaaaatgcagaagaatggttgaataatagaagagtcaccttgtctggcagaagtgttgaaaatgggctcttgtaggggcagaagaaaagcactcaggccattggataggcagactttttcccttgagaatccatgactcttgtcaccctttgcttccctctctacccagggactttactgctttacaacctaaggaaccagctaaaacaacagcaacaacgataacaacaaacccaattctcacccgccgcacctgcccccaccacccgcaaaaarcaaatccaaacaaaaaactatttaaaaatcacacaattcacaaaaagcgtctcaagagtatgttaatgtaaataccatttgtattaaacccttaccttatttaaacgtacacatagrgcttgactttaagaaacccatgcatgaattatttgaataactgaactaatgaagggtgaaattaaaataaatatattcaaataatgagaggyggtataagtgaagggaaatatggtttaaattctgagtcttataaaaataatatgtatgtacatgtagtacaactattaaaatttgggctattcttgtttcttaatatttttgtgtataatgataaaaaacaataaaagaaataaagctatttgatttggatgtacagagaaaaatccaagctatgggaagtacattgtgacccccaggtgtatacatatgtacataagctggggttaagctattgccttaattttagccccacccatgtacactctgtgacgctgcctgggattctacaaatcacatttatcttttgccactaagctccctgttaggatctgccaatcagaggacgctaggggcggactggaaggctgagtggggaagaaggaagacacttcctgtttgcttcctgttctgtttaacgacaccctaasgattacttttcatttcagcagttatagtttgtttcagtagcaacagttatttccagttttagttttgacagcattcctagaactagctccttagggttttttaaagacaccaacgccaaccagcaagcgccccctactgagcggtctaggtcccagctctgagaagccactcaagtttctaagtttagtatttatattataattctaacctcttccctttgttgtctcagcactaggtagctgcttcctatgttgcttataccatgatattttagtattccctcttgccttctccatttttcaatatctggtcggatagcaattctttatattgaattatttctgtaaaaataactgttggggtttctattctatatcttagatggactctaactgaattaatacatatgtaaatatatggtgaatatatataaattataaacatatgtctctatatgtatatatagatatgtgtctctatatcaatgtatgtattatagatatatacatatatgtatatatagaaccatagataattctccttaatatgcatgtacatagatatgtacatccatattatatgatatagaatatataaatataatatctaatatatgcatattaaggagaattatctatggttctaaatatgcrttatacatatctatatgcatactgtatatcatataatacatatccatgtacatgcatattaaggagaactatttacggtttttggtctcatttgtaatgctcataaaaattttctcttttaattttaatttcattgaaaccatccttggactcatacttggagacaaacttacttggtcactatatattattattttgacacactttggtgttcagttagctaagttagaaatttagtttatgtgtttattagttaaaataaataattgactttccttgtactgtctttttctggttttgatgtcagtgttgtttagctttgaggaatgggctaggaaatgtttcatatattttgaaataatttgtataaattggaattatttgtttcttaaaggtttatggaacatctaaagaacaaattcatctggctctcatacagtttttaggatactactttgattgacatttcagtttcttttagatctatatcttctatttttcttgaggctattttgataattatttcttaagatattatcaattttcatctagataawaaaatatatcattttatgtatttttaaattcatcgatatttccacttttcattgacaacattattaagttttattgtgtctcttttttcaaattatacttgatgaaattttgaaaatgattggtctttccaaaaatcacctttaggttttattgataaactttttcttattttctaagtcaggatacaaaatcagtgtacaaaaatcacaagcattcttatacaccaataacagacaaacagagagccaaatcatgagtgaactcccattcacaattgcttcaaagagaataaaatacctaggaatccaacttacaagggaggtgaaggacctcttcaaggagaactacaaaccactgctcaaggaaataaaagaggatacaaacaaatggaagaacattccatgctcatgggtaggaagaatcaatatcgtgaaaatggccatactgcctaaggtaatttacagattcaatgccatccccatcaagctaccaatgactttcttcacagaattggaaaaaactactttaaagttcatatggaaccaaaaaagagcccgcatcaccaaggcaatcctaagccaaaagaacaaagctggaggcatcacactacctgacttcaaactatactacaaggctgtagtaaccaaaacagcatggtactggtaccaaaacagagatatagaccaatggaacagaacagagccctcagaaataaygccgcatatctacaactatctgatctttgacaaacctgagaaaaacaagcaatggggaaaggattccctatttaataaatggtgctgggaaaactggctagccatatgtagaaagctgaaactggatcccttccttacaccttatacaaaaatcaattcaagatggattaaagacttaaacgttagacctaaaaccataaaaaccctagaagaaaacctaggcatcaccattcaggacataggcatgggcaaggacttcatgtccaaaacaccaaaaggaatggcaacaaaagccaaaattgaccactgggatctaattaaaytaaagagctgcacagcaaaagaaactaccatcagagtgaacaggcaacctacaaaatgggagaaaattttcgcaacctactcatctgacaaagggctaatatccagaatctacaatgaactcaaacaaatttacaagaaaaaaamaaacaaccccatcaaaaagtgggcgaaggacatgaacagacacctatcaaaagaagacatttatgcagccaaaaaacacatgaaaaaatgctcatcatcactggccatccgagaaatgcaaatcaaaaccacaatcagataccatctcacaccagttagaatggcaatcattaaaaagtcaggaaacaacaggtgctggagaggatgtggagaaataggaacacttttacactgttggtgggactgtaaactagttcaaccattgtggaagtcagtgtggcgattcctcagggatctagaactagtttattaatttcttttaaaaaatcttcaataattctaccctaattttctgagcattttcttagccatctgaaagcttagttcaacaattttcaatgttttgttttttaatactaccttggcataacactgagggtatatccttattttctcattctcacactctcaatagttctatgtagtttgtaattttcattttgctgttcccttgwcctaaaagtaattttgaatgcgaagagcacttttcagtcacttaatttttaaaataaattttattgtgtacatttaaagtatacagcattatgttatggaatacacataggtagtaaaaatttattatggtgaagaaaattaacatatacataatctcatataggaagaaaaaactttgtgtgtggaaagagcagctaaaatctactgatttagcatgaattctatgtacagtacaattttattacctatagtcttcatcttgtgcattagatctctacatttgtttagcctatatatctgctactttggttttttttatttacttttaatttttgtgggtatacagtaagtgtatatatttatggggtacatgaggtgttttcatacaggcatgtaatatcaaataagcacatcgtggagaatgggatatccaccccctcaagcatttattcttggagttacaaacaatccatttctattctttcagttattttaaaatgtacaaataarttgttattgattatagtctccctgttrtgctatctactaattaatagtagttcttattcataccttctattwttttttgtgcccattaaacatccctacctcccccaccaccaacatcccactatccttcctggcttctggtaaccatccttctactctctctgtccatgagtttaatagttttaatttttagatcccacaataagtgagaacatgtgatgtttgtctttctgtgcctagttcatttcactccacatgatctccagttccatccatccaggttgttgcaaatgactggatctcattctttttataactgagtaggaattcattatgtatatataccacattttctttatccatttatctgttgataggcacttagattgcttccaaattttagctattttaaacagtgctgcaacacacttaggagtgcagatatttcttggatataatgatttcctttcttttgggtgtatacccagcagtgggattgctggatcatatggtagctcaatttttagttttttgaggagcctccaaactgttttccctagttattttgccaatttacattcccaccagcagtgtacaagggttcccttttctctacatccgtaccagcatttgttatttgcctgtcttttggatataagccattttaactggggtgagatgatatctcattgtagttttgagttgcatttctttgatgatcagtgatgttgagtacattttcatatccctatttgccatttgtatgtcttttcagaaatgtctattcaaatcttttgtccatttttaatcaggttattagtttttttatagacgtgcttgaactccttatatattctggttattaatcccttgtcagatgagtagtttgcaaatatcttatttcactctgtggattgtctcttcacttagttgattgtatcctctgttgtacagaagctttttaacttgatgtgatctcatttgtccatttttgtttggttgccttgcttgtggcatattgttcaagatgtttttttttgcccagaccaacatcctgaagatttttccccaaagttttcttgtagtagttttatagtttgaggtattagatttaagtttttaatgtgttttgatttgatttttgtatatgatgaaagatagaggtctattttcattcttctgcatatgaatatcccgtttccccagaaccatttactgaagagtctctcttttccccagtgtatattctttgcacctttgttgaaaatgagcatacctgtgtggatttgtttctgggtcctctatactgttccattggtctgtccattgtcctgtgtatgtcttgaaaagttgtagtagttattatttttgattggttcattatttcatctttctacttaaaataagagaaatttacacactacagtttcagtgtatagtattctgtgtttttctaggtacttactatttctaatgagttttgtacttttagataatttctgattgctcattaacatgcttttctttctgattgaagtactccctttataagtactccttttacaagtactccctttacaagcatttcttgtaggacaggtctgctgttgatgaaatccttcagcttttgtttgtctgtgaaaatcattatttctccttaatgtttgaagggtattttttgccaaatatactgttctagcataaaggttattttccttcagcactttaagtacatcataccactctctcctggcctgtaaggtttccactgaaaagtctgctgctaggcatattggctctccattgtatgttatttgtttcatttttcttgctgcttttaggatccctgctttatccttgatctctggcagattgattattaaatacttgccattttgagtctattttctagatcctgtaggtgtgcttcattgttttttattatttttatttttttttctcttgyctcctctgtgtatcaaatagcttgtcttcaggctcacacgttctttcttttggttgattaattttgctattaaagkactctgctgtatttttcattatgccaattgcatttttcagcttcagaatttctgcttgattctttttaattatttcaatctctgttaaatttatctgataagattctgaattccttctctgtgttatcttgagtttctttgagtttccataacacagcggttttgaattccttgtctgaaatttcacatatctctgtttctctaggatgggtccctgctgccttatttagttcatttggtgagttcatgttttcctggatagtgttgatgctagcagatgttgttcaatgtctgggcgttgaagagttagatatttattgtagtcttcactgtctaggcttatttgtagccatcctttttgaaaggacttgggtgttgtgatctaagctatatctgctttagcagcaccccaagcccagtaatgctgtggttcttgcagacttgtaaaggatcaccttgatggacttagacaagatccaggagaattttctggattactaggtagagactcttgtyctcttcccttactttctcccaaacaaacagaatctctttctgttctgagtcacctaaagctgggggtggagtgacacaaacacccctgtgaccacctccagtatgactgtgctgagtcagaactgaagccagcacagcactgggtctgcggtaaccactccctggctaatgcctatgttcatataaggccctgaggctctacaatcagctgattgcaaagccaatcaggtctgtattcttcccttcagggcagtaaggttccctaggcccaggtggatccagaagtgctatctaggagttagggactagagttaaacacctagcagtctatctggtgttctattgtactgtggaggaactggcactctaaccacaagatgcagttattctcactcttccctcctctttccaaaggcagaggaacctcaccctgtagccactgccaccccaggccataaggaatactgtcagactgactacctccaatgtttctttaagatccaagagctcttaagtcagcttgtggtgaatgtttcctggcctgggactcatccttcagagcagtggactccactctggcccaggacagagccagaaattttatgcaatagtcaaatcctggaactggggagcccaagagcttgcttggtgctctacccaccctatggctgtgctgatacctgaagccagcaagtctcagaggcttacccaatgcccttgatgtggtacctgagtatcgcttctggtttttcagggacgaaaagctcttcagttagcagaagatgaatgctgccaggattggatcctttctctcaaggttatgggttcttttatgacccaaggtgtgtctaaaatgttcatgtgggaggtagggcccagaacaggggccttttgactctgaccactgccctatcctgctatggctgagctggtatccaagatccaakacaaagtcctcccaacttttccctctcctcttctgaagtggaagaaagggatttcttttcgagctgtgagctgtgaagcctgggggtaggggaggggtgatgccggcactcctttatccacctcagctggtgtctcagtatgtcatgtgccccccccccccccccccagtccactgtttcaggacctggttcagcactgggactcacctaattgttgcagaccttatggactacattggctttcaagtttgtttggagacacagagcactttggtcactggtagtgaggtttgcaggaactcaagttctgacctctgggatccatgatccctctctgagtagtgccggtttaaatgcttccctcgtgggcaggtgtcagctgagtytggtccggtttccctttctgctccacctggatagcacaaaatttaatgtctcacagttgctatgttctctctcctctagcacccagagatgctctctgcaccatgccatgacttccagggggtggagaacaggtaatgtcaggggttcagggctcttttttctatctcttcagttgcctctttcagtgatatgaagttaaaaccaggtactatgagtgctcatctgatttttggttcttatgaagctgtttttttttttttttttttctgtgtagatagttgttaaattggtatctttgtggagaaggcaatcagtggagccttctgtkcggccatcttgctccttatacctgctactttgtattctctgatctatgtctcttcatttctccactcctctgttccaaccacccctggtaaccatgtttgtcttctctatttctgtatatttatttacttattttagaatctacttataaatgagatcatgcagtatttttctttctgtgtctggtttatttcacttgtcataatgtcctccaccctctttcatgttgtggcaaatggcaagatctcattcttttttaaggctgaagaatatcccattgtatatatgtactacagtttctttatccattcatccatcaatggccacttaggttaggttgtttccatatcttggctattgtagaaaatactgcaatgaatatggaagtgggttatctttatgaggtgttgatttcatttcctttgggtatgcccagaagmgatattactgggacatgtgggagttctatttttaacttctttagaaaccaccatactcttttctataatggccacaccaatgtacattcccactaacagtgtatacaagttcccttttcttcatactcttactgacatttgttatcttcagttacttaatttttattggtgggaagggggctttattaacatttttttgttgagattattcatttctaattttttgcactattattggtgcttgctacaatttctagtttttgtttcataatttcaacttttagattcagggaatacatgtacttgtcacttgggtatattgtgtgatggtgagctttggggtatgatggattttgtcacccaggtactgagcatactactcactagttagtttttaagcctttgttcccctctctacctccacacttggtagtcccaagtgtctatttttgccatctttgtgtcattgagtacccattgtttaacttccacttataagtgagaatatgtgatatttggttttctgtttctaggttaatttacttaggataatggactcgggctgcattcatgtagctgcaaagaacatgattttgttatttttaatgtctacatagcatttcatggcatatatgtaccacattttctttgtctaatccaccgttggtgggcacctaggttgattccacttctttgctattgtgaatagtgctgcaatgaacatatgactacatgtgtcttttgggtagaataatttattttcttttggatatatacccagtaatgggaatgttgggttgactggtagttctgttttaagttctttgagaaatctccaaactgctttccayggtgggtgaactaatttacattcctaccaacagggtataacattcccttttctcaacagcctcaccagcctttgttgtttttgacttttcaataatggtcataatgactggtgtgagatggtatctcattgtggttttgatttcatttatttgatgattattgatggtgagcatatttttatgtttgttggctgcttgtatgtcttcttttgaaaagtacctgttcatgtcgtttgcccatgtttaatggggttatttgtattttgcttgttcaattgtttaagttccttatagattctggacattagatcattgtcagattcatagtttgctaatattttctcccattcattaggttgtctgtttacttcgttgataatttcttttgttgtgcagaagctcccaggtttaattgggtcccacttgtcaatttttgtttttgttgcaattgtttttgagcacttagtcataaattctttcccaaggctgatatccactatggtgtttctcagattttcttctaggattcttatagtttgaagtttttcatttaaatctttaatttgtcttgagttaatttttgcaaatggtgaaagatgggggttcagttttattcttctgcatatggctagccagctgttctaacaccatttgttgaataaggagtcctttccccattgcttctttttgttgaccttgtcaaagatcagatagctgtatacatgtagctttatttccgggttctttattctgttccattggtctatgtgtctgtttttgtatcagtaccatactgtttgggttactgtagctgtatagtatagtttgaagtcaggtaatgtgatgcctccagctttgttctttctgcttaggattggtttggctattcaggctcttttttaagttctgtatgaattttagaatagttttttttctagttctgtgaaaaatgacattggtagcttgaaaggaataccattgaatctacagtttgggcagtattgccatttgaatgacagtgattcttctaatacataagcatgaaatgttttttcatttgtttgtgtcatccatgatttctttcagcagtgttttgtagttctctttgtagagatcttttacctccttggttagaggtattcgtaggtatttcatggtttttgcagcagttgtaaaygggattgctttcttggttttgctctcagtttgagtgttattagtatgtggaaatgaaactgatttttgtacattgattttgtatcctgaaactttattgaaattgtttattttatatatatatatattattatactttaagttctagggtacatgtgcacaacgtgcaggtttgttacatatgtatacatgtgccatgttggtgtgctgcacccattaacttgtcatttatwttaggtatatcccctaatgctgtccctccccacttccccaccccacaacaggctccagtgtgtgatgttccccttcctgtgtccaagtgttctcattgttcaattcccacctawgagtgagaatatgcggtgtttggttttttatccttgcgatagtttgctgagaatgatggtttccagcttcgtccaagtccctacaaaggacatgaactcatcatttttcacggctgcatagtattccatagtgtatatgtgccacgttttcttaatccagtctatcattgatggacatttgggttggttccaagtctttgctattgtgaatagtgccacaataaacatacatgtgcatgtgtctttgtagcagcatgacttctaatcctttgggtatatacccagtaatgggattgctgggtcaaatggtatttctagttctagatccctgaggaatcaccacactgtcttccacaatggttgaactagtttacagtcccaccaacaatgtaaaagtgttcctatttctccacatcctctccagcacctgttgtttcctgactttttaatgatcgccattctaactggtgtgagatggtatctcattgtggttttgatttgcatttctcrgatggccagtgatgatgagcattttttcatgtgtctgttggctgcataaaggtcttcttttgagaagtatctgttcatatcctttgcccacttgttgatagggctgtttttttcttgtaaatttgtttgagttctttgcagattctggatattagctctttgtcagatgagtagattgcaaaaattttctcccattctgtaggttgtctgttcactctgatggtagtttcttttgctgtgcagaagctctttagtttaattagatcccatttgtcaattttggcttttgttaccattgcttttggtattttagacatgaagtccttgcccgtgcctatgtcctgaatggtactacctggttttcttctagggtttttatggttttagttctaatatgtaagtctttaatccatcttgaattaatttttgtataagatgtaaggaagggatccagtttcagctttctacatatggctagccagttttctcagcaccatttgttaaatagggaattgtttccccatttcttgtttttgtcaggattgtcaaagatcagatggttgtagatgtgtggtattatttctgagggctctgttctgttccattggtctatatctctgttttgttaccactacctgctgttttggttactgtagccttgtagtatagtttgaagtcagataacatgatgtctccagctttgttctttttgtttaggattgtcttggcaatgtgrgcccttttttggttccatatgaacttgaaagtagttttttacaattctgtgaagcaagtcattggtagcttgatagggatggcactgaatctataaattaccttgggcagtatggccattttcatgatatcgattcttcctatccatgagcatggaatgttcttccatttgtttgtatcctcttttatttcattgagcagtggtttgtagttctccttgaagaggtccttcacatctcttataagttggattcctaggtattttattctctttgaagcaattgtgaatgggagttcactcatgatttggctctctgtttgtstgttattggtgtataggaatgcttgtgatttttgtacatttattttatgtcctgagactttgctgaagttgcttatcagcttagggagattttgggctgagacgatggggttttctaaatatacaatcatgtcatctgcaarcagggacaatttgacttcctcatttcctaattgaataccctttatttctttctcctgcctgattgtctctgaagatagaccaatagcaggctctgaaattgaggtaataattaatagcttacctaccaaaaawagtccaggaccagatggattcacagccaaattctaccagaggtacaaggaggagctggtaccattccttctgaaactcttccaatcaatagaaaaagagggaatcctccctaactcatttcatgaggccagtgtcatcctgataccaaagactggcagagacacaacaaaaaaagagaattttagaccaatatccctgatgaacatmggtgcaaaaatcctcagtaaaatactggcaaaccgaatccagcagcacatcaaaaagcttatccaccgtgatcaagtgtgtttcatccctgggatgcaaggctggttcaacatacacaaatcaataaatgtaatccagcatataaacagaactaaagacaaaaaccacatgattatctcaatagatgcagaaaacacctttgagaaaattcaacagcycttcatgctaaaaactctcaataaattaggtattgatgggacatatctcaaaataataagagctatttgtgataaacccacagccaatattatactgaattggcaaaaactggaagcattccctttgaaaactggcacaagacagggatgccctttctcaccactcctattcaacatagtgttggaagttctggccagggcagtcaggcaaycagaaattggttatttgttccagtagtcttttggaggagtctttatggcttactcagtatagatcatatcatcagcaaagagagataatttgatttttttacctatgtggatgccttttatttctttctcttgcctgattcctctgggaaggacttgcagtactctattgaataggagtggtgagagttggcaaccttggcttgttccagttcttaaagagaatgctccccgtttttgcctgttcactacaatgttggctgtgggtttgtcatagatgtctcttattgttttgatatatgttccttcagtgcctagttttttgagaacttttaccaagaagggatgttggactatattgaaagttttttgcatctattgagatgataatattgttkttgttcttaattctgtatatgtggtgaatcacatttgttgatttgcatatgttgaaccaaatttgtawcccaagamttaagcctacttggtcacggtgaatgaactttttgatgtgctgctggattcaatttgttagtattttgttgaggatttttgtatctatgttcgtcatggatattggcctgtaattttctttttaagttgcgtctttgccaggtttggttattagagtaggctgacttcatagaataagttaaggaagagtccctcctcctcaatttttagaaatagtttcagtaggattggtaacagctcttctttgtgcatctggtagaatttggctggtgtgtatccatctggtctggggcaccttttttttttggtatctttttttttgttgctgattcaattttggaacttgatatttgtctcttcagggattcaatattttcctgattcagtcttgggagattatgtatttccaacgatttatccatttcctccagattagctagttcatgtgcatagaggtgttcataatagtcattgaggatcatttatatttttgtgggatttgttgcaatgtcacctttgttatttctgattgtgcttatttggatcttctctcttctgtttgttaaccttgttagtggtctattgatctcttctgtcctttcaaagaaacaacttttggttgcactgattgtataaattttgaggtctcaattttgttcagttctgccctcattgatttcttttatttttctagctttggggttagttttttgtatttctagtgtgatgttagattattaaattgagatatttctaccttcttgatgtaggagttcagcactatacactttcctcttaacactacttttgcagcatcccagagatttttggtatgtcgtctctctgtttttattcctttcaaataayttttttttgatttctacctttattttgttgtttaccccaaactcattcaggataagctgtttaaatcccatgtaatggggttttgagagatctgttggtattaatttctatttttattccactgtggtccaaaaatatggctagtatgatttcagtttttttgaatttagagacttgctttatggctaagcatgtgattgatcatggagtatattctgtgtgcagacaagaagactgtatattctgtcattgttgggtagagtattctgtagatgtgtattaggtccaaatggtcaagtgttgaatttaagtccagaatttctttgctagttttctgccttgatgatctgtgtaaggggatcagtggggtgttgaagtcccctgctattcttgtgaggctgtgtaaatcttttctaggtcaaaaagtacttgttttatgagtctgggtgctcccatgttgggtgcatacatatttagcatagttaagtctttttgttgaattgaaccctttatcattatgtaatgtccttctttgtccytttttactgytgttgatttaaagtctgtttttttctatgagaatagcaaccttagctcttttttgtgttccatttgcatgatagatcttttccaaccctttactttgagcctatgggtgtcattacatgtgagattggtctcttgaagacaacagtcaaatgggtcttgtatctttgtacaaattgccactctgtgccttttaagtgaggaaatttagaccatttacattcaagattgactattgatatgtgaggctttgatcctctcatggagttgttaggtggtggtttgtagtttctattgtttggttgctttatatggtctgtgggctatgtacttaagtggtttttttttggtggagcaagtatatttctttcatttctatgtttaaatcttccttgaggatctcttataagggtggtctagtgttaataaatccccttagtgcttggttgtctgaaaaatattttattttttctttgcttatgaattttagtttggcaggatatgaaatcttggttggaatttcktttctttaacaatgctggaaataggcccccaatctgttctggcttataaggtttctgctgagaagtccagtgttagactgacggggttccctttgtgagtgttctgacctttttctctagctgtctttaagatttttgctttagcattgaccttagacagtctggtgacaatctgcctgggtgatgttcatttagtatattatgtcacaggcattctctgtatttcytttgcttggatgtctacctgtctaggaagattagataacttttcttgaattattccctcaaatgttttctagattgttttctttgtctctctttctctcaggagtgccaataattcataggtttggtcacttcatataatcccatatttcttgaagaccgtttatttttaaaattcttttttctttacttttgtctgactgggttagtttgaaagattgatccttaagctctaaaattctttcttctgcttggtccagagagatggagtcttgctttgttgcccagactggtcttgaactcctggcttcaagtgatcctcctgcttcagcctcccaaagtgctggaattacaggtgtaattcagtgtgtctggcctttggcttacacttttattataatttgtcctgtctaaggtttctttttcatattgttatttttggttttcctctgtgctttcatgttaaggatgtcacttataaacaatgcatagcaagcttcttttttttaacctaatctgtgaattgctatattttaatagatagcttagccctggcatatgtattatagctaataatgaatttaacttttttctgtgattttattttgttttctttttacttcacttgctatatatttctctttacctcctttccagccttttgttagaatgatattttttctctttttttctcattctaatggtttggaagataatgctattctgagtaattattagtaaatttctatcatacaaacttatgtttgttcatctcattttttttgccaaagttcagttattcagtatcctgaccttccccattatttacataggtatctctgcactttctcattttcatataatttgaaatttgagtttgatagctactatgattttattgttctagcctgtcaatatgcttagacaattttaagtagccttcttttcttatcattacctttttaactccactttttctttttgtattttatttttgttttgctttttttttgttgctcttctcattcctctattcattgcatcctctaataattcttttcagacagcatttccaagtggtaaatgatgtcagtctttttctttctttctgtaatttctatatatttgaaatcctgtatttatctaactcttygtatttaccaggttagataaaactaatctggttaatttttatttctatagtaaaatttttttattataccttaagttctagggtacatgtgcacaaggtgcaggtttgatacataggtrtacatgtgccatgttgctttgcagcacccatcactcatcatttacattaggtatttctcctagtgctatmcctccccagcccccagccccccaacaggcctcactatgtgatgttccctgctctatatccaagtgatctcattgttcaattcccacctatgggtgagaacatgwggtgcttggttttcatccttgtgacagtttgctcagaatgatggtttccagcrtcatccatgtccctgaaaaggacgtgaactcatccttttttatggctgcatagtattccatggtgtatatatgccacattttcttaatccagtctatcattgatggacatttgggttggttacaagtctttggtattgtgaatagtgctgcaataaacatacatgtacatgtgtctttatagtagcatgacttctaatcctttgggtatatacccagtaatgggatggctgggtcaaatggtaattctagttctagatccttgaggaatcgccacactgtcttccacaatggttgagctaatttacattcccacaaacagtatgaaagcattcctatttctccacatcctctccagcgtctgttgtttcctgactttttaatgatcgccattctaactggtgtgagatggtatctcattgtggttttgatttacatttctttgatgacaagtgacgatgggcattttttcatgtgtctgttggctgcatagatgtcttcttttgagaagtgtctgttcatatcctttgctcactttttgatgggcttgtttttttcttataaatttgtttaagttctttgtagattctggatattagccctttgtcagatgggtagattgcaaaaattttttcccattatgtaggttgccggttcactctgatggtagtttyttttgccatgcagaagctctttagtttaattagatcccatttgcctactttggcttttgttgccattgcttttggtattttagtcatgaagtccttgcctatgcctatgtcctgtatggtattacctaggttttcttctagggtatttatagttttaggcctaacattcaagtctttaatccatcttgaattaatttttgtataaggtataaggaagggatccagtttcagctttctacatatggctagccagtttttccagcacgatgtattaaatagggaatcatttcccyatttcttgtttttgtcaggtttgtcaaagatcagatggttgtagatgtgtggtattatttctgaggcttctattctgttccatttgtctatatctctgttttggtaccagtaccctgctgttttggttactgtagccttgtagtatagtttgaagtcaggtagtgtgatgcctccagctttgttctttttgcttaggattgattgacttggcaatgtgagctcttatttggttccatgtgaactttaagtagttttttccaattctgtgaagcaagtcattggtagcttgatggggatggcattgaatctataaattactttgggcagtatggccattttcacgatatttattcttcctatccatgagcatggaatattcttacatttgtttgtgtcctcttttatttcgttgagcaggggtttatagttctccttgaagaggtccttcacatctctcgtaagttggattcctaggtattttattttctttgtagcaattgtgaatgggagttcactcatgatttggctctctgtctattattggtgtataagaatgcttgtgatttttacacattgattttgtatcctgagagtttgctgaagttacttgtcagcttaaggagattttgggctgagatgatggggttttctaaatatacaatcatgtcatctgcaaacagggacaatttgacttcctcatttcctaattgaataccctttatttctttctcttgcctgattgccttggctggaacttccaacactatgttgaataggagtggtgagagggggcatccttgtcttgtgccggttttcaaagggaatgcttccagtttttgtccattcggtatgatattggttgtgggtttgtcatagatagctcttattattttgagatacmttccctcaatacctagtttattgagagtttttagcatgaagagctgtcgaattttgttgaaggccttttctgcatctattgagacaatcatgtggtttttgtcatttgttctgttaatgcaatggattatgtttattgatttgtgtatgttgaaccagtcttgcatcccagggaggaatctgacttggtcatggtggataagatttttgatgtgctgctggatttgttttgccagtattttattgaggatttttgcaccaatgttcatcagagatattggtctaaaattctcttttttttgttgtttctctgacaggctttggtatcagtttgatgttggcctcataaaatgagttagggaggattctctctttttctattgattggaatagtttcagaaggaatagtaccagctcctctttgtacctctggtagaattcagctgtgaatccatctggtcctggagtttttttggttggtagcctattaattattacctcaatttcagagcctgttattgatctattcagagattcaacttcttcctggtttagtcttgggagggtgtaggtgtccagaaatgtatccatttcttctagattttctagtttayttgtgtagaggtgtttataatgttctctgatggtagtttgtatttttgtggaatcgatggtgatatcccctttatcrttttttattgtgtctatttgactcttccctgttttcttctttattagtcttgctagctataattttgttgatcttttcaaaaaaccagctcctggattcattgattttttgaagggtttttttaatgtatctatctctttcagttctgctctsttcttagttatttcttgccttctgctagcttttgaatgtgtttgctctggcttctctagttcttttaattgtgatgttagggtgtcgattttaaatctttcctgttttctcttgtgggcatttagtggtataaatttccctgtacacactgctttaaatgtgtcccagagattctggtatgttgtgtccttgttctcattggtttcaaagaacatctttatttcttccttcatttcgttatttacccagcagttatttaggagcaagttgctcactttccatctagttgtgtggttttgagtgagtttcttaatcctgagttctaatttgattgcactgtggtctraaagacagtttgttgtgattgctgttcttttacatttkctgaggagtgctttacttccaactatgtggtcaattttaraataagtgtgatgtggtgctgagaagaatgtatattccgttgatttggggtggagagttctgtagatgtctattaggtctgcttgttgcagagctgagttcaggtcctggatatccttattaaccttctgtcttgttgatctgtctaatattgacagtggggtgttaaagtstcccattattattgtgtgggagtctaagtctctttgtaggtctctaaggacttgctttatgaatctgggtgctcctgtattgcatgcatatatattaggatagttagctcttcttgttgaattgatccctttaccattatgtaatggccttctttgtctcttttgatctttgttggtttaaagtctgttttatcagagactaggattgcaacccctgcttttttttgctttccatttgcttggtagatcttcctccatccctttattttgagcctatgtgtgtctctgcatgtgagatgggtctcctgaatacagcacactgatagatgttgactctttattcaatttgccagtctgtgtcttttaattggtacatttagcccatctacatttaaggttaatattgttatgtgtgaattcatcctgtcattatgatgttcgctggttatttcgcccattaattgatgcagtttcttcatgccatcaatggtctttacaatttggcctgtttttgcagtsgctggtaccagttgtttctttccctgtttagtgcttccttcaggagctcttgtaaggcaggcctggttgtgacaaaactctcagcatttgcttgtctgtaaaggattttatttctccttcacttatgaagcttagtttggctggatacaaaattctggtttgaaaattcttttctttaagaatgttgaatattggccccccactctcttctggcttgtaaggtttctgccgagatatctgctgttagtctgatgggcttccctttgtgggtaacctgatctttctctctggctgcccttaamattttttccttcatttcaaccttggtgaatctgacaattatgtgtcttggggttgctcttctcgaggagtatctttgtcgtgttttctgtatttcctgaatttgaatgttggcctgccttgctaggttggggaagttctcctggataatatcctgaagagtattttccaacttggctccattctccccatcactttcaggtacaccaatcaaatgtagatttggtcttttcacatagtcccacatttcttggaggctttgttcttctctttttactcttttttctctaaccttgtcttctcactttatgtcattaatttgatctttaatcactgatacactttcttccacttgatcgaagcagctgttgaagcttgtgcatgcatcatgaagttcttgtgccgtggttttcagctccatcaggtcatttaaggtcttctcttcactctttattgtagttagctattcatctaatctttcttcaaggtttttagcttccttgcaatgggtttgaacatcctcctttagctcrgagaagtttattaccaaccttctgaaacctacttctgtcaactygtcaaagtcattccccatccagctttgttctgttgctgacgaggagctgtgatcctttgaaggagaagagtcgctctgatttttagaattttcagcttttctgctctggtttctccccatctctgtgtttttatctgcctttggtctttgatgttggtgacctatagatggggtttttgtgtagatgactttttgttgatgttgctgctattcctttatgtttgttagttttccttctaacagtcaggtccctcagctgcaggtctgttggattttgctggacatccactccagaccctatttgcctgggtatcaccagcagaggctgcagaatagcaaatattgttacctgatccttcctctggatgctttgtccaagaggggcagccacctatatgaggtgcctgtyggcccctactgggaggtgtcacccagttagtcagggacccacttgaggaggcagtctgtccattctcagagctcaaccaccatgctgggagaaccactgctgtcttcagagctgtcagwcagggatgtttaagtctgtagaagttgtctgctttcttttgttcagctatgccctacccacagaggtggagactagaggcagtaggccttgttgagctgcagtgggctctgcccagttcaagcttccaggccactttgtttacctactgaagcctcagcaatggcggacacccctcacccagccaggctgtcgyctcacaggttgatctcagactgctgcactagcagggagcaaggctccatgagcatgggagctgccaagctaggcataggagagaatctccttgtctgctggttgctaagaccttaggaaaagcagggtatttgggcggaagtgtcctgtttttccaggtagtctgtctcggcttcccttggctaggaaggggaaatcccctgaccccttgtgcttcccaggtgaggtgacgcccttccctgcttcagcttgccctccatgggctgcacccactgttcaaccagtcccaatgagacgaaccaggtacctcagttggaagtccagaaatcacccattttctgcgtcgatcacacttggagtttcagaccagagctgttcctatgtggccatcttggaatgcccctatatagtcaaaattttaatctcttccatcttatgttgattttatttaaggatgaaattttaaaatatgttttggagaatattatttataattataaaaagtcttgtcctgctcactgtaaattttcttgctttgcatataaatttcttctctttgttgagtcacatattgtttcttcatggtattggctttctctaaatattttatgattcttgcatatcttctgaaattccctattaaactcagaaaagggtgtatctgtttttgcattctgcttggtgggagaaagaggaccaatttttgaacatgaaaataagtagataagaatctgtgccctgggctcaccatttctactgggtgttgacagttgcctgaagcacaactttgtctctctgacccagtgttttgccactctcctccacctgaagaagatttttttttttctattgcttggctcttgggcaggttgaggagagaagagaggagatgaaggatgtgtaggttgctcctgctgtaaagatcygccctattttgcctggcccctgtcctatttctagtttctgctaccttcagacatgaggttactggtgcttctcctgtcttttgtagtttcgactctcttaagtgcatttgggctgtggttcccatctccaattcaatcttctgctttctgccttttaaagtcctgacagtatctcctttttttttgttttctgttgttgagatagatttatttattaggttggtgcaaaagtaattgtggttttggcaattttaatggaaaaaaaaaaacacaattacttttgcaccgacattttttttcttcttttagcttgtaaaggaatttgtaccagaagtggaggctgccctgaatgctcagtccatcatcttgaactggaaccacccttcacttcttaagataattttcatcatgcaaaaagagtgaaattcagtagtctcttcaacatcctatatgtattcttttggttttggctgtgtttttgttttttaaccataactcataaagcataagaatggctaccagaattaatgttaagcagttagcagctacttagggctatagtttttagttatgtttttacagtatatatttccatcctatgttctcttactctagaaaatgtaagataaatctagggctatccctgtataattttagcctcatagaatcttgaaatgaagaataggtgttgaccagttttttagaaacagggtagggggtcttgttctttcatcraggctggagtgcagtggtctaatcatagctcactacagccttgacctcctgggctcaagccatcttcccaccttccaagtagttgggattagagtcatgagccaccatgcttggctccagttttcttatttgtttgccaagtggattgtcttcttttctgttattcaaacaaataaatatgcaaaacagcaaaaaaagttttgcagacacggtggaaatatccaaggagtttttttaaagtatggggttcaatttgaattttactaccttctgaatataccttaattaatattgaaattgatcaatggattggagacatttgttaatgatcacaaaataattttgctgattaggatcaaacacagagtctccatgtaatgatttggaagggtgtttaatgaaagctgcaatattgcctacattgttttcatggactttgctggaagcatctttgaaacttaatggcaacttattattatattcaatggtctaataagacaaattcagaaaaaaattttgggctgatcccctgaagtttcaacatttaaatagtctaggaagtattggtgggtgtgtgattttattcccagatccttaataggctgttaagtaggtggctccacacacacccactttacatttttcttgtcacatgtgattcatttttattccacatttaaaaatccttccgagaaaaatattagataattttcatttcaaagtctaatagtccctgtggctgacattatttccaaggtctcatctcaatattatatgctacaggataaatttattacttttgttctttccttagtggacgtaataataattactactactttttgggcattacttctctgcttgtgatacggctctggcgagtagaggaacactagggctcttgtctcatgttcaattagataaaacaacatggacacacttggagtggttttaaggagcagagggtttaataggcaagaaaaaaggaagaagaaagaaggaagaagctcccctatacagagacagaggaaggggggctccaaagccaagagagggaaccccaagtgaagcagaaaccagccatgtgtatacagaggctggaggaggtggtgtctgatttgcacagggctcgggggattggtttgaccaggcatgtgattcacatagcctgggaaaaagctggccttcccaccctagccttttaatatgcaaatgcagggaaccatgatgttctacagaaattctctacagttctctacacacttggagatatgtgggggtggccatgttgccaggcacatgtggggcaagggcaagaaggcaactcctacaacacttgtaaatatacacgtaaatataataatgcacatgaaaattgttactaaactgtaaagtactattcaaaaatattaacattatttatggtagtattattagcataatatcatgttaccatatcattgatttttaagaactttggataataaaaataatgagaaagtctctctctctgtctctctctcactgtcttttggtgagcaatgcgactcttcccaatatcagaaactaaaatagaatttctttaactttccagctgagccccagaaaacctttcagcaaacaaacatgatggtttcatataccagttggcatgaagataaagtgttggtgctgcattttaaaggggaagtttgagaaatatgaggaaagtaactaaactagaatcaattataataggctggttatcggcaaatatacttttcagaggaacttggagcatctcaaagaaagccaggagtttagcagagtgttctacattctctttctactgtgatagacatgggcctaaacttttcatgcctctttttcattacctgtgaaactggggtcatagtagctttaccgttcttaagaacttgttataaaataccgtgtgtaccccagtgacttatggaaaaataaaataaaaaaattataaaatcacaagacaagggacttctaatgccttgttttcctcaaaaggaaacagtcttaagtgaataagtgatttgtcccaagtcagaaaacctagttgggctataataaactggaagctttttgaattggaatagatgttttagttatatagtatttaaatctttttactgaatcaggaattctctgcaatctctctggcattcattttgagatcactccttgttaagaaattgactgcatttcagggtggaacattatattattggaccactttaattgtctggcagtcattgtttttaatgtcatgtcaagttcctgtgacttctataccttgactcttatcacaagtgtgactccctagaaagcagacacttagaaattagcaagtttatcagggagtgcttttggtatccattctgtgtaaaggaagagaaaacaaataaataaacaaacaggatttgacagagaaagaagtcactctgtagtgcagtttgaatagagtgcctcagtggatgctgcagggaatttagatggaacaaactcttgagctgggatgacagagccaggcctttaaacctctctgtctatcacttactgaaagtaggctgccctgggaagggggcgtgaccttgggtgaaacagctttcttctgctgaggcaattcccaaatggggctgacatgctagggctgtttgtaggcagctaaagctttaattcctttatttctgaaaaataataaaggtgatacctcatagcattcaccacacataatacatttttagaattagtttgtaaatttctactaaaaatattcctgctgtctttaattgggattgtgttgtatctatagataaatttaggaagaatcgatatgttaacaatgttgaatcctcaatccattagtataattatttatttgagtcctctttaatttctatgggtaatattttgcagtttgcaatgtataagccacaaatacttttggatacatttgtgtcttgatgctattttgaatggaatattcaaatttccatttaaaaatatttatcactagtatatagaagtataattactgctttttatgcactggttttatcttctgaaatcttgttaagctcacttactagtcatagtagatttttaagtcaattccttagaattttctatgtccatgatcgtattgactatgaagaaagttttatttctttgtttccaatctgtatgccttttatttatttttattgccaggttgcaatggttagggcccatagtacaatatggaatagaagagccgagagcagacatcgttctgttgatcctagtctagttcaataacattcaatctttcattgagtatgatattagtagattatagtaggtgaattaaaattctagagtaacaacatgaaaaggatgcagtaagggtccattgcttagtaaagtcatacactgtctcaatttaactgcattaatactggatacaacagtagctggaacaagttgtaaataattatctactacctagctttgaaagagagcacattttacattcttatggaaacttttttttttttaatgatgaaacaaccaattctgtagcatatagaaaatgcataatgtcctgcaaaaataactgtgtagtggaaaattatctctttcagatattcatcacttactgttcactgattttcatgctgagaggttcatgcttagactactcttcaaacaagtttatctgggttgaagttttttgcctcgctccctttggacgggaggttgacattttcttattaaattcataaacatatcttctacttatataatattcaagagccagccatgactgcaggaaaatccatgagggtactcatggcctcattcttttaccacttcctctccatctcctcactgcttacataggagctcagcttcctcttaaaatccctttcagagaaccctggaaattttcaggatgttttgctcaggaaaaaggctgctcatgttgtactaattctggcttctcatttccgtctcttagttctgcttctgtgggagctgccctccctgaaaatgtgtgtttctgtagtggggtacgatccactgacgttcctgaaggaagagcagttctttaggtgcctgacttggtgaggactttgtcattgatgccttaaagcatcaatgrtcatgatgagagccttacgtagtctttcatgaagtcagctccttcacctgtcaccatcccatttttccctccacaggtgtcaygtagggaggagagaaggaaattccttggcatcccctttatcatctttaccatttctttgaccttgtccaaccagtcatatcacaaacaagcaaacaaccaagcaaaacccaaatattttcttcttttagtcaaaacacgaaaactaatatgaatattaattcatgcaaatgaaaacctgcaatgatcacccacaaaccagttacaaataaacaaatttggcctcagttggaaacctggctacacagcaatgcctccattgactagagtcagtcagttgcatgtttctattttgcaaaatcaatccaacaatcatttactgaaggctcatagagtattgctctgggggatattgaaatgaatatagataaaaagcaagaatgtaatcttcttaatgtcttctgtttagaatagcttctacttcacaaggcctttttgttttgtcattcattttcaaattaattaaaatacagctcattattttccaggcacaaatatttgctcactatatttaaacatataaatatttaaacacataaatgtccactgctaattgccaggcaattagcagtggacatttgactgcaaatggagtagagctgattgtaacattatatgcaaatgaggagtgctgaatctaatcatgcattgagatttccagacagtaaaaaattataccctctctaaaaacccaaagctttacattcaaaggtctacccaggaataaaggcagtaatggatgtcactacttgtagttatttactttaatcaccaatgccaaaaatgatatttagatgatgattgagaacattagcatcttgtaaatatcaaacatgattatttcctgtatggttcttgaacccctcactcttaagtcaaatattttcttgtgtatcatttttaataaatcagaacaacaagagctgaaatgaagacatcatcttatttaatcattttaaaaataaacacaatagttattactcttatactttataatagcctgagtataatcatacctacttctggagagacagattttcattcataagacagctttctgaaatcctcttctcatttatcaaactggaaggattggctaataaagcagtcaaaatttaaaaatatatatttagtttggttgaactctttgttttaatttaatgagctcatctagcttaaaacatatataaacatgaatatgtgtgtttcattcttccacagaattttggaagcaatacgggcgtaaaaggtttaattcatcatttctttgccacctcgattagaggttttaagcctattccttcaagctgcatgagtcatatcagaaaatatgagaaatcaacatcctgaaataacttgaattgagatttgtttaatggtgggatggagcagtatctcacaaagtgaaagctttttattaacactgaagaaaatacaaccatcatcaggcgagaagattataatggaggttgagaaggataactttggctgtggatgtttccacactgagaaaaaatgtctctgccctgatcagatgctagtgacctgctcatttcctgcatttgctatcaccaacacttcagtcctaatttcatatctactgattggtttcatatcctcctcccccttctcttcttgtcaaaattggagccacttttcaagacctagctcaggattttgctctgaaacccttcctgatcctcccggtttaatttaatcactccttcctcttcttcttaacagcacttcttatctgtaccggtcctttgaccctgaatcatatgctactttatatggttcattgcatttgcaagcctatttgtctgatcttagctagwttaaaaagsctttgagggcagaggctgtttgtttctgtgcttatactatctagtggctgtatagggggaaaaattacatgttgatgatcccaactaatccttttgctccaggatacgtggcttcctcaggacatgccatgcatatgtgaggtctattttaattcataacatcctagatatggctccagagtcagataaacctaaatttgaatctttgatccaccacttattaaatgggattttggggtacatttcttaatttctgtaagcatccatgtactcatctggaaataaagggaataataaaattgtgaggatgaaattagataatggctaacaatcacctggcatggttcctggccaataattagcacaaaatagtggcaattattattactatgggtgttgaagcatggtggaccctcaagtggctctggtagtcggggaggaggattgcttagagagtgcacagagtgctggactctatcagccagtcatcaaaatcgcagggccaaacacaatgcagtgagctcacacttaatgtagggcagtgtcaggagagaggcaaagtatgaatgagaatcatgccaacaagagtccctaatggtaataatactagaaattaggcatctggcaagtactgtttcgaggtggtcttttcagtttggttgaagacattgaacagcatctaagatttctcaaaacagaaccagtttttctgaaagggaggctagggaatgggtaggcagggttttaggtgctttgttgagtagatgagagtttgttttgtttcatgttaatgctttttcttccagcaactgcccaaagcccctcttcctcatgttggggctcagaagctgataccccaatacatggcgctttgacatgttgagttgaaggaaaagcctcaggtctctttgaccttcccctccactcccgatattctgtcttccccaaagcacagggtgaaattgttctctgargttccttgatctgcctaaagtctggaactgccaaagaataaaacaattacctctgttcccttccctgagtttgtattaattgaaatcacttttagggaagaaagattgaagtctgttaacacgcctggacagacttttgtcataaaccattgtcttctgcttcagtcccattcagtattatatagaaccatttaccagccattgtctgctctatgggyccaacagactttgtcccaggccattgtatattcttcaagcccattgaattcccctaaaaataatttactactccccccataaaatcatccatatttcctcatctcacattatcctaagaagaagggtagataaccacttgtaccccactgggtgttggggtgatcactctgtgatttctcccatgcatgttawtaagaatttatatgtcttttctagtattaatctgccttttgttgatttttttgcaaaactttggagggaaaaagggaagtttgcccttcacccctatacttttcttcttgtttgtagagtcactgactcattgttaccattttcttatctccattctcttaccaacccaatgcaatagagtttctcctacaggtcctctgaaatcactccagccaaggacattagtgtttttcttgtttctgactctatggattcattgtcatcttgtctctcaacagcatccaaatctatagaccactctgttattcctgagtttttctctgcttttgtctgctgtcagatcaaacataatcacttggtattcttttttggcttctcctactcactttccccaccaggttcctcttcctcctgtcaattaattgttaatattcctcacaattccctctttgtctctgttataactctacatcctctcctttagtgatgtctctgaccctaccaagtagtaagcactcagccgggcatggtggttcacacctgtaatcccagcactttcagaggctgaggtgggcagatcacttgaggtcaggagtttgagaccagcctggccaacatggcaaaaccccgtctctactaaaaatacaaaaattatttgggcatggcggcacatacctgtaatcccatctacttgggaggctgaggcaggagaattgcttgaacctgggaggtggaggttgcagtgagccaagatggcgccactrtattccagcctgggtgaaagagtgagtgagactctgacacacacacacacacacacacatacacacacacacacacacaaagtagtaagcactcaggagttcgataaccacctttatgttgatggcttctaaatctctgatatcagtccagatccttttcttgacctcaactacagggccaactaactactagatttctcaaacactattaagacagaactcttcacctctcccaggtctccaaatttattcttcctctcctgttccttctctcagggaatgacaccattatccattctgttgttattcaagtaaaacagactcacatccttcttgacatttcatttttttatatccaattaatcatcaaatttctactcaagcttcctkaccctgttttcctcttctgggtagataggtcttgtttgataattcatctgcaaatatatagactagagtgcttacttaaaaaccgctctcttgtttttcttttcatccacctgttaccacatagcttaatcagttttgccacatccctttcagtgtggacttagaaaatatacccccaaaaagcttcagtttcaattagctgggcgtgatagcacgygcctgtaatcccagctactcgggaggctgaggcatgagaattgcttaagcccagaggtggaggttgcagtgagccaagaatgggccactgcactctagcctgggcgacagagcgagactccgtctcaaaaaaaaaaaaaaaaaaaaagaaatgaatgygcatatgactaccatcctaatataaatggagcttatgccagtactatttgcagtagtactacttgaaataatgctcacaataaattttatgcttattaaatagtaattatacataatatagaaagtcaaatagtgctacaaaacttacaataacaacactcattaacttgacccccttccaaatctgatttttttacttctccaaggcaaccactttcaattcttttagttacactttcaacacttctattgttgtctccttatttctaaattaaatgcttatactgtgacttcttgattttaaactttaggtattatttattgacttcctgttttgagagttttgctttcttataccacwcctccccttgcctttcccccctgattaytcctctctccatcttcctaatagatttacatataatttctatttacgtttagaattttcattaccatgactatggctagagctgagccctgtagtgtactacatataataacatttttgttttactacaaatgcttttgcttttcctggagttaaaatgttcttattttaatgtgttttcttacatttctttttacctattactaaatcagtcatatgctttgcacaagcactataaaaatcttctcagtatggtcaggtttttttcttttttcttggcgaattcctcctagaaatctctatctgactactctaatcttaactggttacattctaagcctgctccacagctgttgttttagacacttatattcactcttttttggaaattccctttaccrctctccttggttctttgtaacattactggatttcctgaatactatttcttagattccatcttatttgttagagcacattctccaataatttcctgagaaaggggttaggggaaataatgttttgtagaaacttgcatgtctgaaactatgtattatattgtcacatttgattagctgttttgccagacattgagttttaaataaatttttttctgaaaatttaagccacttttccattattttctattttcagagttgatactgagaagtctattaatgcgtggatttctagtttctgtgtataatttatttttttctctctgaagctttcaggatctttctccttgatactctaaagttttgcaatgatgtaatatggcttgagtctttctaaattatttttctgggccctacttggatcatttaaatgtggaaactcacatccttcattttgaactatattcttctattatttattccagaattgtttctcctttttttttcttctcctgatcctttcattctattttctgggtgatttcctcattttattgtacaacttgtctattaaatttttgcatttgcttctatatttttaatttcaaagacctttttcttattcattcattcattcattcattcaacaatatttattgaataattatgatatgccagggactaagatagatgctggagatagacacaaacccctgcccttcagtatcttatcttctaatggttgaaggcaggtatgggattgcaagtaccaaaagatgggtgatatcaattttttgtttttttgtttttttttgagacagagtcttgttgttggctggggctggagtgcaatggcaggatctccattcattgcaacctctgcctcctgggttccaggaattctcctgcctcagcctcccgagtagctaagattacaggcatacgccaccatgcccggctaatttttgtatttttagtagagactgggtttcacccagtcaggctggtctggaactcctgacctcagctaatccatctgcctcagcatcccaaagtgctgggattacaggagtgagccaccatacccagctgatattacattttaaaaaggagagtctgggtaggcctcattgagaatgtttgatgatgcttgactgctcatcatatttacaaatgmggtatgaaaaagtaattggaagcactttgtaaatgtgtgcatgtgggggatggattgttttgtgaaccattgggccttaccatagattaattgagcatttaaccacttctttgggccctttgccttgaactgactgctttctccaggagaagctttattctcctgtctgaaacatatgtgccagactgccagcattctgragccaagtcactatgtagatcatctctctttttatttgagacaaggtctggctctgtcgcccaggctggagtgcagtggcatgatctcagctcactgcaacctctgcctcccaggccaatgcyatcctcccacctcagattcccaagtagctagggctccagccacgcaccatcatgcccagctaatttttatattttttgcagagacaggatttcaccatgttttccaggctggtctcaaacccgtgagctcaagtgatccacctgccttagcctcccaaagtgctgggattacaggcctgagccaccatgcccagtcaatatgtagatcacctcttagttatgctgtttcttgcagggactctacttgaacactcagttgtgattactgtccctgaggcaagagcctcttcagctttatttctcctgagattgaatccccagttttattccagaatagtgaagaggcagctatttgacagtctgggcttgggaagaagacacagatgtataactgatttttatacatatactgacatttgaacagtcttctttttgtcagctctgacccacacccattttgagagttatagtttcctggtggctctgctgtctgaactctctagggttctgaaccacgagaggcattacttccctctgacaaccaccatttcccccaaagctgatagtaggcttttagctttctcttttctgttagctactgctcatctacccacacttcatcttacaaaattttatcaacatctgtcacctactagtatctctgaactcatgtcttttgttttcctgggtttataccaatttcctttgcttttattttagtggagttttggaggaagacaagataaacctgccctatttaataagaagtccaaaataaaagacttaatccaaattacttgaaaacttttctgaatatatgaaataaaattttcattctcacaatgagaatagtctttcattctctatgaattctccaaataatttagtgattaagaaaacagatctattttcttaatatttcataarccttttggttacatactaaaacaatgtattaatattcttatacggtaatcatatttgagttggttcattagactttattttaacattatgagtaatttttttttttattagaaagtcttttgaattgtagggcataaggaatttttagttgtgactcctaggtctaacatttaaaaaaattcaaaacacactgtcttagcaatgttactagaattaatcaaacgctaaaattttgtaagcctgactccatagaccataaaatattggaaagatcacttgctatgaagtcaataaacttggaatttaatctcaactataccactggctacctgactttaaatgaaatgaacacttttgacctcaagttcctaatctttaaaatggggcttaaactagttggcctaataccaatattgaatgattatttgayagttacatagaaatagattggatgtagaaatagagatatgaattgcatggtgtttgctcactagaatgtggaaaactgtaaaggatgcatgaatatcaagcaaagagaaataagtcacataggttgcctgccattctttaatgcttattttctttcaattttttctttttaataatcttactaaagtgaagctggggctgttagtggtggcaaatccrtatgggyctgcagcaaccttacttcttgcctccttagaagaaagaattcaactgaggggcattaggcagagggagaaactgaggaaagttttagagcatgagtgaaagtttatttaaaagctttagagaagtaatgaaattcctttcattacttctcaagccggcgacttgagagatcaagtgcactgtttgccctttgacttggggttttgtatgttggcatgcttccaaggggttgcatcccttctccccgatttttcccttgggatgggcagtctacatgagcagtggcctgtcagcaattgggaggggagcatgcagtgtatgtactggtgttgtgcacatgctcacttgaggcattcttcctttaccagtctaatgttcctaggaggtcatctaccagttaaacttaccatttttgccttttagtgtacatgcttgagcccacttgcccaactcctgagatcttattgggaagctgctgatcacgagtttcatactttttcctatctattgggagactgcctttccttggtgccagttgtgaccaattattattttagagaggcagtttagccaccaccagaccatcacatcatagttgcctgacattcctggtgactggggggaccctcacctgctctggttatgtctgcctgactgactactgtaacagggccaggtcattttcttgcttaaacatcttactatagtccataggataaagatcatcactcctactcatgacatatgcacagccattgccagtggtttcaaaaggcttgcacatcacgaaggctcaataaatgttattgatttgaactgaacagtaaatagatcamgatggtataactgccttttagtgctcatagccaatgttctaaaacattctcctggtctatttttttgtctggctgccgtattgctatgatttctaaaaaaacccatagttttctggatcaggaagacactttactggtgggtcaggttatagagatcactgagaatgaagattttagtagtaaaatgatgtaaataatctaaatacaaacccttctactgctaaatcaattagagtcttttcccaatccttagagggaaaaaaagttaatagatttgctgaattttaactatttctctcctttatttttcatatcttttggatatttacttgattaccagggttcaagcaaatgattctcaatttgcttgaatcattgttttagatttattgtttagaataattgttttagattgtttatttcatgctgctttctgtgtgactgctctaggaacraagtcatgagtagaagccagggaggcatgaaagaaaaagtcttgtggcacccacaccgagaagatgctaagcagagatgtgaggaaacaaagctgagaattgagggacaatccaagggaaagaagtggactgggaaatsggttctcctggcctggaaaagacacgtcaccacagraaaaaatctggctccagagaacaatttattttaatatgcctcattttgctatttcattaattcagaaatacttggcctttttttctactgttactgtggaggcataataggaaatgtaaacatactggtacaaaataagaaataacttatttatatggcaggaagactagaaaaatcacagccattttcttcttcttactataagctctaattttccatgatactgctctacatacaggatctttatttaaaaaaacctgaagtgatgatattacattgccacatcaacatttgaaattaaatgatcaatgggtgatataaaaatggccagcacatggtacattttgtaatactttaagtcacattgttgagatccttgataaagatatgatttgcttttaatctggcaccatcatttattttgggcaaagctagaaaacaaataacataatttgcataatgaaaccattgagagaaaaatcactgtaatttgtcagaggtatctgcaccattttgacttacagtttaaattcattcaagtttatttctttccttaccccaactaaacaatgcttttgatttattcttgccatttagtgtcatataaaataaagtgttccactaggaggagaaataatttgtcaagtagaaactatattaaatgaaacattctctctgatatgtttttaatttgttttattcccattttgctattgcaattttcccacctgccaatggagataaggggctgtttcattctttctcttttggctcgcgaaggccacacgcttgttttgttaaggagagtccacctatcaccaggagggacagaagtcagctcaggaagggagaccctgccagggractcagccatgaggtaaggccagccatgagtccaaagacaagtattcctgagcacctgaccgctatttatcaaacattgttctaggggatgtggggaattgtaagagaagctcaagacagtgttcttgtctgggctgatgaaaccttatcctaattcaggctacagtgaatactttatgtgcaytctgagtgttcctatcctttccttgttatatggcaggagtttttgatatagggtacatggaccccaggaggcccttggatagaacacaagtggtaaaattccatcttttaaataattaactactaactgaaatttagccatttcttcaattatatatgttggcacaaaccacagtagtattaagagtgtctctgaccttgtcagcagtagaaaacactgatatttttatataatatcacagttgttgcagatatcttgraacatcatttgtgctttatcactatttttgaaaattatagtagttattagacctgcagctagagtttgttacttaatgcattcatatagaaagacatcattaaatcacatttttctggatacttttataattgtacttcaatgcaattggtgtcttttgtaatcctacgtattttctttcatacattcaaacactcatcggaggagtggcccacagaccttaacagttggccaaaggtgtcagcaatacaacaaaggtatcgaatccttatctatgatgatcagattaggtaatttctttattcacttatacttctaatagaaaaagaagagaaaaaatgaaaaaaagtaaaattaagggtttaatttcaaatgtttggtggggtggagttgttgaagtggttaacagcattgaggcttctgagttagtagaggcttaaaatttttcctttatatattcattatttctggtaattgagttattcagcatctgacctttaccgtcttgataatatttctgtctgttgtttcttgcgaaccttttctcgaatctgtcagcttgtgaccttggaaggttacttaacaccccctgccttacttttcatcattttctggttggagctaataatgcttcgtttgatgttgtatttttgtgtgtgagatcttttgtttgtaagatcttaaaagatattgacagtatttaattgaataagaatacatttgtaggcatttgaaactctaatgccttatataaatatatcaatgcaatgatttattattacagctgttatgccatagcatgttgggttgctgacaattttttatttttttttgtgacgaagttttgctcttgttgcccaggctggagtgcagtggcgtgatcttggcttactgcaacctctgcctcctgggttcaagtgattctcctgcctcagcctcccragtagctggaattataggtgcctgccaccatgcccagctaatttttgtattaatttttattattaattttatatttcaccatgttggccaggctggtctcgaactcctgacctcaggtgatccacccgccttggcctcccaaagtgacggtattacaggcgtgagccaccacacctggctgacaaatttgtatgtatgtatgtgtgtatgtatgtatgtgtttattatttttgagataggatcttgctctctcactcaggctgaagtgcagtgatgtgatcatggcccactgcagccttgacctcctgggctcaatccttccttctgcttcagcctcctgagtaacttggaaaattggcatgtgccactgtgcctgactaatttactttttgtagagacagggtctcactatgttgcccaggttggtctcaaactcctagcctcaagcaaccctcctgcctcagcctcccaaagtcttgagattacaggtgtgacccatcacacccaggcaacaatttttaaaaagaaactctaatccctcaactatatcattgttgggtaaggaataaaacataaataacgtcaaaagggggcaccttatgattatttctcatgggaacatggtgcttggaaatgttatacctctcaattttctaggatatgatgtgctgtcatcaattttttcttaaacatgcctctgacatggttaatagcacagtgcatttcctgagagttagggtggatggtggagtgaagggtcttgttaacatcatttggtgtacccatagtgatgctcccttgaccatagtttcttctcagtagttgaaggaattgcaatcatttccccttgcagagctaggaacatatgctggtagtgttaaggaacattttggtccacgcatcatcttcatttttgcagacagcatatttttaatataaccaagagtccaaaatatttcaacaagtaataaatgtaaacttttctaacaccttttattacatactgtggccaaaatacattgaagaagtagagtacaaattttgaaaagatggctgtaatgtgacacctctcctgtcatttaaatcaatattgcagctaatatatattaactttaggttgatggtgattaacccagcaccctccatgtgccaagtgttctatcctggcttttattagttactgcttaccaacatccattggtggtgctactgttcccatcttgatttgttttgagaaccttgaatatgagaaacagactctccaacctgctttctcttacaaaatcagcaggcttggggagcaatatttaaagaacacaaaaactttgatgcagacagtaaatatttccttctctccaagaaatttcatagccagcatccttatttctttgttagcatcaactgtggcattaatgtagcatccccagcctcacgtcagtgtttggagctcagttgaacaacagagtaggtggaatgggctgtgatttatgtgtatcaataagctcataggccccacccttgcttagtcaaaatcctataattagtaactgatatggttttgctgtgtccccacccaaatctcatcttgaattgtagctttcttattacctacgtgttgtgggagggacctggtgggaggtaattgaaccatggtggtgggtttttcccatgttgttctccttgatagtgaataagtctcatgagatctgatggttttataaagggtagtttccctgcacacattctcttgcctgccaccacctaagacgtgccttttttgctccttcgttttctgccatgattgtgaggcctccccagccatgtagaactgtgagtccattaagcctctttttctttataaattactcagtcttgggtatttcttcataaccgtatgaaaatggactaaaatagtaaccatctctggtgacgcctttattacagactttgcaattataagctattccttaagccacagaaagaaatgaagaaaggaagaggggaagacagaaagaaaacaattatcacttggtttagtgaccacgtgtgttgaggacaggtaaatgtttttattgtaaagccatctaagacccaggcattgggaatagggcatggttaataataattaacactagggaggcagctgacaactttggcatttagaggctcatagaaagaagaaagctcaaaatcatgtgttagcttaaaagagttgggttttagcctcccactgattctgcacaatttagtggcaagatttgaaaacaacaccaacaacactgctatctttgacattcatggaacaataaaaagtaaacacccagaaggtaacaagcctgggagatattaaccgagggatcccatggtttctcacttttccattcttccatgaagtcactgtttcacatagcttggagtctgtgaaccatgccaatatatgtgtctttttaacatggttcattttttaagtacatcattggtttggagagatgagaatgagaagatgagttaacttttattgtgaggcaccygtatggtttagactttcactgcaactttgttacaggtgagcgatatgcccttcatttcacagactctgtggggtgtccatcagcacatgagtaaagatcttcctttggagggtaaccactttctgacattaactgtgtcttgatggagaacacagcatatgagttatgagttttggcctgcgagttgtgaaagatgactcggaaaatatagccttggagaactaactcagaaaactcctctggcagcactaagccataaacagactcagctcatttctaattttggctcctcctcagatgtccaggatgacacaagccagccgtcaagcccatttctaattgctcctgttgcaatgtgttgacatctcttgtcttctttgtgaaaacgtgtgggatcatttagatgagagtagagataggaaaggaaaaggactagtttgaggcaacctctatgataatgaccagaaaggggagcaaactgaatggagtggagcaggaaggtagttgagaaagggtattagtagaaggaaagaatttggtgaaacatgacaatatttctgaagagctctagtagtaaacgcttgatgaatataggaaaaaaagaccatggtagaaaatccccacaatgcaatagagatggtaaaaaaagggaacagagcagaaaatatgaagtgtttaagattaagctaactaatagttctatgtcaatgctaatactcatgttgttctcccactatttgcatatctttctaggaatagaaaaaagaaggtacatgtctaagaaggatttaaaaatgtcaaggaaagaacaatgagatgagaaagattaaagtcagaggtgagcatcaggacttaaaaaattttttttcctgacaacaaggttattcataaaatggaaaatgccatcttaaatgctatgttacagaaataatgattgtgggatttacatatttagacccacaggctattagagctggaaagagcactaaaaatcatttagtctacttcttattttagagacaggacaaaaggcttggattgttattctcagggtcacaaaagcaattaacagccactcaggaacttaagtataggtattctggttcttagtctaggactaagaaccacagcaatttctttcctttctcataaatgtgatgattaaaaataaaggtcatgtagtttattgacttgcttgggggaaatcaacacattagaagcaaacacatgactagaacaagagtctcttgatttttggttcagagcataaatttgcttgacatgaaactatcaatggtttcatagattgagtttcctgaaatgacataaagattaatgagcaggaatcttattaggtaattctcttggaaacagtacttatagaatggaagaggaaggagcagaattgggaagaggggaaaagtgggctgtgatgcagtctaatcaaagtcataggtaatcccagaggaaagtctgagactggatggctcttggggattgtcatgagttggggcaaaggggtcagtccttcataaccctgagatcagtctttatttgctgcacccagggagaagccatgaccttgagcaargatgcgcttttcagccaggacacttaacaaagagggctgacagctgtcagcacttccagaagctggtaaaataagaccttcattcttaaagggacatcttggcagaataccaatgactattytagtccactgcttataccactcagatacacatcttcatatacatactgaaaatcaatcttctaggatcttagtaggtttcttttgctggcagaatgttgtaagattaaggttgataggataaactggtacccttgcagaaacagctagttgcaagatctcaaatgatatttatcatctctcttcttcactatccactttagattttcctcatcatctgctggtcttggtggcttcccagtggcatggtggtgaccatcctgagctcctggccaccctgtcctcttcaagccatagctgcacttgtccatttatcatcaaacgtaggcaaatagaccacatgggtgccaaacatatttcttcgtgctccccattgtatataagaatgctactttctttcagggttaattgctaccaccaagatggtgactctttttattttaagctggtcacttgctatgaggaacctgaaatgcccaggtgtcagccaaagcttatattacaactagaattttcctatgtttcctggtggaagcatttcytctttggcttgaacttcaagccatgcagctccaagagttgcaggtatgagaagcacaaatttcccaagtgggtcactgtgagtggtgataagtgggaccactcttgcttccatatatcagttcctggatccatgtattcaagcacctgggatacaataccatataaagatcattgatttagggtgtacagtgtatttgggaggttagagccccacattgacaatgtcatcttcaagctggcacttcagctgtgccttcaacgggccattccgttgctccctcagaccagcaaattttggtttgtgtggtatgtggatacaaatcagtgatccagtggtcagccaccagatacccactcttcaacctcctttcttcaatgtgaatctcttgatctgatgctgtatcatgtaggatcccacactggtgaaccaaacctctgtaagtcttcaagtagtagtgatggctgaagtgctatgggcagaaaagccaaacccatacctagaacatgtgtctattcctataaaaatgaattactgcctcttccaggatgaaaagtccaatcaccaagggactgtttggtctcctgtagagatggtgccattccagagaatttgtattggtctccgtctctagcagattgcatatttgattggaccagtcacttatcagcctcagtaagtggagggctatcctgctgatcctatgcaaaacttctaaccctgaaaatatagccattttatttatatgagtgttgtgctagcactagggaggctaatgagaaagacttgctgatgtgaactggccagctcatattgtctagcttgttatttcgtgcctcttccatggtaggtgctttctggtagatgttaacatttgatacaaaaatctttatatttcactcccattcctataggtccatgcaaatccctctacctcagaccgtatttttctgtcctttcaattttattttttcttaccccttaacctcccagtcaagccatttgccattgctcatgaacccatgcacattctaactacaggacacttccttttctatgtaaagagctcaccacatgcactgccacttgtcactgttgttaagggccacctcaatgtcaggctgtgatatagctttcatccatttcctgcttgcacacacataccaagccaacccatctctaaaccaattttttttttgtttttgaaawtgatacataataattatatgtgtttatggggcacatgtgatattttcatacatgcatgcaatgtgtaatgaccaaatcargatatccatcaccttaaacatttatcatttttttgtattggaaacattccaaattttctcttctaactattctcaaatatacaataaattatagttaagtatagttatcctactgtgctatcgaacactagaacctgtccttctaaatgtattttttgtacccattcatcaaccacttttcacgtcctctttcccaattttttccagcttctggcctatcattatgctctctagcttcatgagatcagcatttttaactcccacatatgtgtgagaacatttgatatttgcctttctgtgcctgggttattttatttaacataatgtcctccaggtcagtccatgtttctgcaaatgacagaattttattctttttatggctgaacaatactccattgtatatattccatttttttactgagcatattattataaatcttctttattttaaatttagcacattgtgctttaaaattatatccaagtaaaaccatatattcaactctttgttgtttctatacagaagtgtaaatacaacattactttttgtcactaagttgccttaataagttttacaggaagaaaaacattgaatgagaaaagatggcttaaattatatgtggcaggcctgtgaaaccatgcaatggatacggtatgtgtgtgtgtctatatatatacatatatatatattgatattattgatcttgagcatcttttcatatacctgttgcacatttgtctgtctccacatcctcatcaccatctgttattttttgtctttttgctaatagtcattttaactgtagtgaaatatctaattgtgttttgatttgcatttccctggtgactattgaacttgagcatcttttcatatacctgttgggcatttgtatgtcttctattgagaatgtttattcagatcctttgcccactttttagtcaaattattactatttgttgttgagttgtttgagttccttgtatattctatcaagctgttgcatcaagctatgcagaagcttttcagcttgatgtaatcccatttgtctatttttgcttttgttgcctgtgcttttgaggctttactcaaaaaaacccttgccaaaaccaatgtcctgaagcatgaaatttggatttttatcctcttctgtttgttggctagaagggattcccctctattttggtaggcataagatgatggtcaagagctataacatcaatagtggatgacttcaggacctaagctacctgctcatgttgtctgtttctgttaatgcttaatcctgaatgtgctacttttatctcaggatgttaaggtcctggacccaccctgaggtctgatattacccagctcaaaatgagcagttcaggcttcatggttacttggtgtccataatcagacactgcacttctaccaggacccagtagcaaaccaggacctgtttttcaaaagatgtatctgctgtagatggcacagctttactctacaaccctaggcatctgcattttgattctcccattgggctttcaacaaacaccacatggcaccttttcctaccatagattaatgctatgtcatactggtagtttatatcactcaagggaagggtcactggcaccacagtctgaatttctatagattcttttaatgctttggtcattacttaaagttagcagtctttcatgctacctgacatatgatttggtgctgtattcctgcaatggaatatgctgcctccagaacatgggaacgcctactaggcaaggtgcttccttatttgtgatagaaagtgcaaattgcaataatttktattttctttggaagggatatcccaaaatactcaaaaccataggacttctaaaaatattactaatatatcaggccctgaatctctatagagtttatctcttatcctctagtgtgtatatgttttacctaggcctacaatgtacttgtcacttcttttttctagttggttcaattgccatgacatcctagatatagtggactaatgaagttttctgtgatatcctagtcatcaagatctcttagactatatagcaactgaacagaagagttaacatagcccttggacaaggttgcaaatgtatactattgtccatttcaagtgaatgagagttctttctgattgcttttggtgtggttagaaaataatgtatttgaaggatgaatggtcacataccaggtgcctgaggttattgtcatatatactagcaaagatgccatatttgagctagtattgcttggttgagtttgtggtatccattgttattctccaggatacatctttttttttttttttttggtgggtgggggtgcggggggtgagtggttgaactaattgaattaattggagatacaatggggctcaccctcctccatccattaggtctttcattgaagccattaaatttctgccaaattccaggaagacctggaatatgacagtttattagagagtaccctggaaaaaatagccatgaaagtraaaaaaaggaagcaagcttggacagaagaaaaaactggactgaaatacaatctcagtgagtaccataactgatctctagagagctcttggtgtgcattggccctacagagctgtcctgagctaggtgaggagactggccttgatagtcttgtattgaccatttcccagatgcgtggtcaaggcagttctcttcaaccaaggcacttccaaaagaggttgatagctgaggactctgctggaagcagttccagcagctgggagaaaaggtctttcattcttaaagatgaatctggacagtgtgtccactaccaaatgaaatatgggatctcttatataatgtgataggaacctcaaaattggaatcatatattttattttttttcaaagtagaggctttcaggagcttttagtatatttgaaatgaaggataacaaaatagtaggtggggaagagaaaaagaaatggcctgccatactctaattatagaagagtacctctaactattagcatattgaacagacaccgaactcagaggagaatggtatttgtagactgataaatgagtctggaataaactacttcccagaaattgcctaaatgtagctcaggctagcgtaaactagtcaccccaggctggcttccttgtttcactgaaaaacaagtggcacttcatattatggaactaattgcaattggagtgtattccaatatattcttgagagccccaggtatacctgtgaattggaattcatccataatcagtaattatgctcttctatttaaatatttgatcttgggcaagattttatgcaattaaaggtatgagtttggtgtatattgttatacttaatgtcttattttatttaaaatatgaaaaaatgaatttaatcagaaatttcaaaaatgattccttatctgagaggccttctatgatgtcatttaaatagcaaattccttattattctctatctccttactcttttgtctttgcttttgtcactaatatataatatacagtatatttttaatggaatgactatatctcccatctctgtttggagtgtgtttcatgacagcacagaatttatctactttgtttattgcaatgttgctaacctctagaacatagtaagtgctcaaaagatggtgcctaaaaggatggaccaagtgttacacaagtcatattctatttggttaatacacttctccacttctgagaaacatattattgttaaagttaaggtagattaattatgttaagaataaatggtctgggcatggtggctcatgccctgtaatcccagcactttgggaggccgaggtgggtggatcacttgaaatcaggagtttgagaccagcctggccaacatggcaaaaccccgtctctactaaaaatacaaaaattagctgggcgtggcggtacacacctgtagtcccagctacttgggaggctgaggcgcgagaagcactcaaacctgggaagtggaggttgcagtgagcagatgttgcgccactgcactctagcytgggtartagagcgatactccatcaaaaaaaaaaaaaattaatggatgcttttggcaaattcaggactgaaaattgctgtgacttttcctccatgagagtttctgcagtttgggtcataagagttaaatatggttaatacttcattaagtactgtttaactttagcaacctaagacattacatgtcatcaattgttctgactttgtggcacctgatagctactatgctactgtggcattgatgatgttggcggtgatgatagcgatgatgattatgatgatgataatggtaatggtggtggtggtggtaatagcaggttaatattcactgagtggtttttcactaattgtcatgctgaattttgaattcactgacttatgtaatgctcactaagacattataaatacagtttaccattttaatgataagaaaactgagacatagagaatgtaatatccaacctggctggttgtggaaccagcatttgaagtggggtgagacttataccaaagactgcagatcttaactattctgatattctgagcagtggcaagcagagagaagggagagggaagtgataaaatttgaggaaaataaatcccacactccctttcaaaattgtgagtggagaataggagggaatgtttgagagcagtccagaaacatcatttaaaagcaggtaactataaggcagaaagaaaaatggcaacatcagagcataatacgaagattcatgggaaatgggagcagaggagaaggagacccagccttctggggaagacagtgtaggattagagaggaggctgtatttcagctgagactgaggaggggaggtaagacctaccagaaagaagtaccaccaatgtaaacatatcatcaraagtatgttgtgtaatgtatctaagcaatgtagtaaaaaagcgtagtggttaaactttactctcctaggatattgcggtatattttatatttgctatatatagtacatagtagtatacagaatatgtgtatatgtatatgttactacgtaatatacatatactactttccaaatagtatactgcagtacactgccaaaagtaatacaactgatgggcctaaaacaaaacacatttctttcaagggatttgtcaatcaaaaatagtgaaacaatagtaatgcttcattcctctcaacaacccacaatcctcatttctgtatatcctttacttacacagattcaccaactgtttacattttccacatttgttttatcatacatgtatatatataattattattatagctaaatcactaaaatgcttgagagtaagtttcagacttaaagactttaccacaaaatatctcactgtgcattttctaagaacaaggacattcttttatctagccaccatataactattaaacttgtacaatttagcattgataaaaattatctttgaacatacaatccatattcagattttaccaattatcccaataacattctttataacaatttctcctagtccaggatcaaagccagtatcacacattgcattgaattcatatcactttaatcttctttaatttagaagatttcctcagccatttttgcttttatacattaacattttgaagtgtataggccagttgttttgtaaaatgaaactcaatttggatttgcctatttcctcatgtaaattcaggtaggtagttttgcttaggaactatgtatgtgatttatgtcctctgtgacatcaatggtgtcacagatattggtgatgttaattttgatcactagattaaggtgttatctgtcaggattctccattgtaaacatgccattttccctttaaaaccaaataaactgtggggtgctaccactgaaagtatgtaagtaccccaagaaatcttcactcaatgatttcagcacccattaatgattcttgtctgaatccattatgactatatgattaaaaatttttgaatttttcattcaatcctttcatatattttagttagcatttctctcattgttttgtgagcaatttcttactttttggcacagtaaaatattccaggttccacttgtaatttctctctccatccgtggaatcagttgtttccttaaatagccctgcttcttttattggataatggtatcttgaaaccaagacttgggtgttggggtgtggctttttgctactagggtgttattgcacatataatgttccctcctcagccatggggcctacattccaaggtcttcagtagatgcctgaaaccacagatagtactgaacctgatgtaataagttggaacatgttcctgtttatgtttttttctccaacaaacttaatgccttttccatcttaattatgcatttatcatgcatggtgcccattacttttgcagtctgaggtgtgacagcaaaactggcatgaatttttttcctttttcacaatttcataggtagaagattcatattttactgtaaatcttgaaaacctcagcataagatttttcctttccttattaagttgagaacttacacattttcacttaaaggaagcacttaatggcttctctttcrcagatccaaattatcagcatcactactattgcattttggggctattattaagtgaaataagagtaacttgaatagaagcatagtgataacgcaacagcagatctgataactgagatggctcataagtgactcatgggcagagagtatactgggcaaaaggaggattcatgacctgagtgggatggagcaggatggtgtgagatttcatcatgctacttagagtgacatgcagtttaaaacttatgagttgcgtatttctggaattttgcacatattattcttgtactgccattgactgttggtaactgaagccacaaaaagtgaaactccagataagaggagaattctgtatatagatgatatgatttggccctgtgtccccacctaaatctcaccttgaattgtaataatccacatgtgtcatgggagggactgggtggaaggtaattgaatcatgggggtgggtttttcccgtgctgttctcttgatagtgaataagtcacatgagatcagatggttttgtaacggggacttcccctgaaatgccctcttgcctgccgccaagtaagatatccttttgctcttccttcatcttccgccatgattgtgaggcctccccagccatgtggaactgtgagtccattaaacctcttttctttataaattacccagtctcaggtatgtctttattagcagcatgggaacagactaatacaatgcatttgactactgcttaatgggacatttgttattgaacaacaaacaagtggaccttttaggtacatcattttgggagtagccatcagttattcaaagctaaaatctagttgaaatcatggttttaagaatccttattgtaactatgacaataaaagactgcatcatcttttaaaatcttcttgagattaacaatcaagtctcatgatcgattggttggtaacacagattctataaccatggatttttgagcttgtgttctttatccttttgatttgataagaatgctgaaactctgggaaggcatcaaagttaacattgccataacactagaaatatgtgaagaaatatagaagtaacgaagaaaataagtcaaatgtgttgttaatcttctagaacaagcttaagtctggctatagtaatatattttcaaaacattgtatttctgtatgttttgtctactaatgaaggtgttggaggcattcaaaggaatcattaaattcattctaaatcagtaagtctattctaaagtgtttaaagagatttaattaattaagtttataataagtgttaaaatatcaaagaaaaatgtattggaagttttactggcaaaaatttaataaatagagaattcaaaaatacagcaaagaatgagtgttttccatgcacaaaagctccctgatattaaaaagctgaggggtggatggatgggctttgaggtaggatctgggcagagcatcactgtatccactacaattgtcattttattttaccttccccttgtaaggtcaaataaaatgttagaatatatagattcatagactatcaactctgagagggaccttaaatatcacatactttattatggaacacttagcacagataaaaaaattcaaacactcactaagagtcacttcatcaaggtaccaaaacataggttaagctacttcactatgttttagatgctcacactgtatctttcttcacgacttcataataaagattaagcgttgtgttttggatagtccacgttgtgctgtaagtgtgctactaaattccataccagatactgcctctgagaagcttcagaagaagcaatgaattataaagaatgctaatgcgtagtaaccaggggttacaggtgggaacatcacaatcactacctaggacagctgaaattcctagaagcagggaattgaaccagggaccaaacaaggtccctatcagctctttagctctggactgaattgagaaagtattattgtttttaactggttcccatttggccttattaagagtttaattgtgcttttactctaaccttttatcctcttgacatttctttccttaattttataggtttttttgtctcccttcattataattttcttcttatattatactatatttccatctggaaaaagaagtctgtgtctgccactttgttagaaggaccagcagaaaaatattcttaagaatagaaattgcctttattagctgagttgatgaaagaattatatgaggcaattatttcccacatctctgagatcttggccatgaattttaacaataattgcttgcaagtgtattttcttttctattgtatttaacttgagaggaaagatacttctttacctctttgtttccccaataactggtataggtcctgacacatggtaaactctcaataaatgtttttaaatgaattaataattggtaacatgttataattgttcattcaaatatctacgtctttactagactgaatttaaagaatggaataaaatcttattaacctttgtactactactagttcctgcattaactgtttatgtagtaggtactcaatacattgcaatgaatgaaggaatgaaaaaagaaatgagatggactaggaggaactctgcatctttactttagggttgtggatgtaaaattatttttcttccattcctgtcattgatgtgggcaattccacagtattcttatgtactgcctgctgctaaaagagcctcttgatgaaataaatctagaatttagtaagaactcaaggtaatttttagaaatgcaattacttcttcacagggtgagagcactggctacctaaagtgaaaggaaatgattatggtaggcaaagaatactgaaaggagaaagctttgctactctcttaatgtttccctgggtcatccccaggtactatggaaagacattgagacagtctagcctagtgtgtaagtactaaaatcagaaagaaaagcatatgcaacagcatttctataggactaaagaggaaagcaagtgaaacaaggcaaatggacaaacgaaaagcttcaataattcatcaaagaaacaatcaaaaatagatttaagtgcttactgtgtcctaggaattgtgataggtactgtagatatagcaataactagcaaatgttttctctatgctaaagagtttcctaggttgtaggggagattgatattgaatgaataccctcatgaaaaatgatatgtttacagttgaaaaagtgatatgaaggaaaaaaaatctggttccatgttgcatataacaatggggctaccctaatctgaaaggtcagcaacaacattcctgaggaggcatcttataacactagagggacaaaaaaaggcattagtaatacagagagagaaggaaagctattctagatacaactgagagttcatgaaaagaccccaagacagaacaagcttgaggtttcttagaaccaaaagattgttatggttggagcttagtgagaaagggaaagaatggagcaaattacagtgggagaggaaaacaaaagcatcagataaattatgtaatgcctgaaggccaaggagctagggtcttattttaataggaagatattgactaatttaatagaatttatggaggtatatcacccaatttatatttttataaataatgaatgtggaaaatggcaaactaggaagctccaggctctccaactccctcagaaataccaagtaaacaacaacatacccatcaaggtagctctgtgagaactctagaaaccattaaggatctgcaacaactaacaaatgcataaccaagaaaaatccacaggcaaaatagtagaaattttgtggtactttttcagatttaactcactgtttccctgatgcagcaaggaagagaagccaaccaatgactgattattctttcgggataaaaaataaaaagagtaacgcttatttgcaacattctggctcatatagggggctggccaagggacttgtttctatcttgcctgacttgaaatattgacagaaattatggcagagtttggatgtcaagttgggagttgctgaaaacagtttagtcatgatggcatgagagggcttcaggataactgcagacccattggtgcctggggcaagagattacaggaagaggaatacagtagaacatctaaggccctgagaaggagcagaggtgagactcttctgggaatcaagattttaaaagcaagggaattggataaaaagcacatgcactggcccaggaaagatgaattccaggaaaaggcctgaggaaaccttaagcttttacaccgggccagtttgtgaaggtcttcccctgcatggagccagtttccaaagactatctatggtggctattttattcaaatgccaaattttcaacagtgtattataaagcatataaagaaacagagaaacatggcctcttcaaattaacaaagcaaatataccaaaactgacctgaaagaaacaggcttcagacttacttgacaaagattcaaaagcacctgtcttaaatatgctcaatgagataaaagaagtacaagggcaacaaactaaaggaagtcaggaaaataatatatgaaacaatgaggattttaacagatataaattatgaaaaagaaccaaacataaattcttgaactgaaaaatacaataactgaatttaaaaattcactagagggcttcaacagcagacttgactggatagaaaaaagaatcagcaaacatgaagctaggtcatttgaaagtaagaagtctgaggacaaaaaaaagggaagtatgaagaaaagtgaacagagcctaagagacttacggaataacagtaagtggaccaatatacatattacatgagtcctagaaagggaagagagagagagaaaggggaagaaagtttatttgaagaaataatagctgaaaaaaatatcaaatttgaggaaaaacatggaaatacttttcaagaggctcaatacattctaggataaaccaaaagagacccacactaagacacattaaaatgaaactggaaggtgaaagacaaagaatcttgaaagcaataagagaaaagctatttttcatgtacacaggatcctaaataagattatcagaagatttctccccagaaatcttggaggcttcaaagtagtggagtgacatatttaaagtgctggaaaaaaaatcctgtccactgaaaatttgatagttggcaaaaatccttcaaaaatgaggaacaaattaagacatttccagataaacaaaagctgaaagagttaaatgtcattatgcctgcctacaagaaatgctaaagaaagttcttcaatttggaatggaaggacactagacagaaactcaaaaccataggaaaacatacagtttccaagtaaaggtgaacacgtgaacaaatttaaaaactattgttgtaattatgatcaataactccacttttttgttttataggacttaaaaaacaaaataaaaaattataaatctatgttaatgaatacacaatatataaaggtttactttgtaacatcaacaaacaacataaagtggggggtaggcagagcaataaaggagtaccattttttctgtatttggttaaagttgtcattattttaaaatagattgttacaactttaggacattatataatccccatggtaatcacatagaaaaatatctatagaatatacacaaaaggaaatgagaaggaaatgaagacatatcattacaaaaaaatcaaacacaaaaaaagcagtaagggaggaaaagagggataacaaagccacaagatatatagatagcaaataacaaaatggtaatagtaaaaactttcatatcagtaattactttcaagtcatgtaaatagattacattccccagtcaagagacatagattggtagatgggcaggatggaaaaagaaatcaaactacccaactatatactgtgtacaagagcatatagttggaagtgaaagatttaaaaaaaacatatttcaagcaaacagtggccagaagagagcagaggtggctatactaatatcatacaaaatagactttaaataaaaaactattacaagagacaaagaaggacattgtagaatgataaaagggttaattcaccaagaagatataataatcataaacatttatgaatcaaacattagagctcctaaatacagaaataaaaagtggacagaattgaagggagaaattgacagtgctacaattttagtaataaacttcagtacccgacctttaataatgaatagaaaaatcaggcagatcaataaggaaatagagaacttgaacagcactatagacaaattggagccaatagatacagaacactacacccaacagcagcagaatacatattttctcaagtatgcatggaacattctctagaataaatcacatgttaaaatacaaaacaaggcttaataaattttaaaagattaaaatcacagaaagtatcttttttattacartggaatgaaactagaaatcaacagcagaaggaaaactggaaattctacaaatatgtgagttagacaacacgatattcaacaatgaatgggtcaaagtgaaatcacataggaaattgtaaaatatcttgaggcaaatgaaaataaaaacaccatgtgttgaaatgtgtggaatgtaagaaaaacagtgttaagacagaagtttacagttataaatgcttacattaaaaaatgcaaataaataacctgaatgtatacatatgtaactaacctgcacgttgtgcacatgtatcctaaaacttaaggtataattaaaaaaaagaaaaataaataaatattaaaattcaaaaaaaaaaaaaaagagaaaaaggaaaatagagagggaaaaagctaagatggctgactagatgcagccaggaaacatctatcccacaaagagaactcaaaatattgagtaaatcatcagacttcatacagatcttttgagagaaaacacttaaaatcaataaacacagagacactgaggttgaagagggaggaagctgggaagcctgcacagagtcatcgagtagcaggactggcttctggtcctgaacaggtcgcaaggaaggggtgagtgaaggaactttggggcaccacacccctgccatggacctctgggatcctagctacaagagagcccgtgaccccaacggacatttgaattggcagggggaagtgcctgaagagtaggcagaggtagagctcaaacctgcatggagcccagaaggttttgcagtgcacagggcagctacagcaaaatgcaaccataagttcccatccctcaagactctccgtctttccctgagtaagtgtagcccttgctgactgtcaggctgggagagaggagggctacctttctcatgggaccagggcacatctgatccacatgccgtcttttctgctggcctcatgctccttcaaaagggtacgtacagcacagcctctactaacccacctgagtgttttggcagcttcctgggagcagttcatatccccagcactgctggtgcttgaccccagggagcctgaagacaaaattgcaggatggtcccaaccccccagagttcaatcataccacccaagggtattgagctgaaatctgtggccagagctcaagcaggaaggagccccactctcaaaacacagagaagaatgaggcatgggttcctgtgtcagtgtgagtgctagatgttcctccctctgcaaaactggtctggrcaaggtgtagtctgttggccagccacagcttctgtttgagggagccctggaagagcccagtgatctgggcacagaaggttttggacgagtttagctgttcaggcctgctcctgtggcagacactggagggagacctggtagggagatggtgagctgggtggactccacagccatttgctgggctaaaagatcccagggcaagggcatcacaccaactgcacacctgtggcaccacagccctaccaagggatcctccacccttgacccactgcatcacgagaccaccaccagacatatcccacaacctggtgtgactctcccaaactcagaggactagcaggttcacagagagttgcaactgtccttgtgacctaatctttggcattggccacccctaatggagggccgagtgcagcctacaagggccccttttgggctaaggagatgtagatatggtgccagtgattgaagggggtttctccaaggtctgggaacagccttggtgagagggtcatctcttgccccatctccccctccccagagcactgctgcataatcgctgaaatacaaaagtggtccacagctcagtaagagcctatttgctggcccatattcttaagtgctatctactgtatcaaagcttgaattataccaccaaacaaaaataaatttcttcagcatagaaagcctgtgaaactcaaagcaggaaactagccacaactaaggaacccacacagaactttggccctctgaaagcacccagaaaagaagccaatagattatgcactagaagtaccacagtcargccggatgcagtggctcatgcctgtaatcccagcactttgggaggctgaggcaggcggatcatgaggtcaggagatcaagaccatcctggctaacatggtgaaaccccatctctactaagaatacaaaaaaattagccaggtgtggtggcaggtgcctgtagtccctgctactagggaggctgaggtaggagaatggcatgaatccaggaggtggagctttcagtgagccaagatcacgccaccacactccagcctgggcaacagagcgagacttctctctaaaaaaaaaaaaaacaaaaaaaaccacagtcaaatcctcaagggaaaaaatatagaaacaaaaagccccattcgcacaacagaaactacaaaaagaaaagtaaacaacagacccccagataaaatgtaatcagggaaagaactccagcaattcagagagtcagagtgttttcttacttctgaaggattgcaatagctccccagcaatggatcttaaccggattgaaatgtctgaaatgttagacatagaattcaaaatctggatggaaggaagctcaatgatattcaagagaaagttgaaatccaattcaagaaagccagtaaatgatccaaaaagatgacatggtcattttaagaaaggacaaaaatgaacttctggaattaaaaaattcactacagaaatttcaaaatgcaatttgaagcattaacaacagactagagcaaggtgaagaaagaatttcagagcttgaagaccaatcctttgaatcaaccaagtcagacaaaaataaataaagaaagaattaaaaaaaatgcagtctttaagaaatatgggataatgtaaagagactaaacctgtgagtcactagcattcctaattgagaaagagaataagcaatgtgaaaaatatatttgagaatacagtcaacgaaaatttcccaatctctctagagaggttgatatgcaaatctgagaaatacagagaaactgcaataggtattatacaagatgaccatctccaaggcacagtcatcattcttttcaaagtcattgttttttttctaagaaatccaagaaacacagagaaactgcattagatattttacaagatgaccatctccaaggatcataatcatgattctttccaaagtcaacacaaaagaataagcttaaaggcagctagaaattatggacaaatcacttacaaaagaaacccatctagctaagagaagccttctcggcagaaaacttacaaaccaggagagggtgggggcctatttttagtgttcttaatgtaaaagaaattccaacctagaattttgtaaatcactaaacaaagcttcataagcaaagaagaaatcaaatattttccagacaatcaattgctaaaggaatttgttaccactagaccagccttacaagatatctgtaagggagttctaaacatggaaacaaaagaacagtatctgctaccaaaaaaacacacctaagtacatagctcatagaacctgtcaagcaactacataattgagagtacaaagaaaacagctaccaacaccatgacaaaatcaaaacctcacatatcaatattaagcttgaatgtaaaacaactcagccatctgctgtcttcaagagactcttctcacatataatgacaccaaaaggctcaaaggaaaggaatggaggaagatctatcatgcaaatggaagacatagaagagcaggcatagctgctgtcatatcagataaaacagactttaaacgaacaatggtagaaaggacaaagaagagcattgcataatgttaaagggttcaattaaacaggaagacttaactatgctaaatataggtgcacccaacatgggagaaccaagattcattaaaaagtacttctagtcttatgaaaagacttagacagtcacacagaaatattgggggacttcaacactctgctggcagcattagaaagattgttgaggcagaaaattaacaaagatattctggatttaaacttgacacttgaccaattagcctaatagatacctacagaatactccacctaacagccacaaaatgtatattcttctaatctgcacagggaacatactacaagattaatcacatgccttgaccatgaagaaagtcttaataaattaaaaaagatgaaattataccaaccatagtcttgggccacagtagaataaaaatagaaatgaataccaagaagatacctcaaaaccaacattacatgtaaactaaacaacttgctctgaaatgacttctgggtaaacaacacaattaaggcagaaattaaaaaattctttgaaataaatgaaaatagagacatgccataccaaaacctctgggatgcagtaaaagcagtggtaagaggaaagtttataatgctaaacacttacatcaagaaattggaaagatctcacatgaacaatctaacatcacacctacagaaactagaaaaataagaacaatctacctcaaagatagcagaataaaagaataacaaaaatgagagcacaactgaatgaaattgacaccccaaaatccatacaattaacaaaccaaaaatgaattatttgacaggataaacaagaatgatagcctgctagccatattagcaaagataaaaggagatctaaataaacacaatcataaatgacaaagatgatgttacaactggtctctcagaaatacaaaagattatcagagactattatgaacagatctacggaaacaaactagaatatttagaggaaatggaaacattcctggaaaaatacaaccttccaagtttgaatcaggaaaaaattgaaacccagaataatgaattctgaaattgaatcagtaataaagaatctactaataaaaaagagccctgaccagatggattcacaaccaaattctaccagaagcacaaagaagagctggtaattctactgaaactattccaaaaaaaatcaaggaggagggattcttccctaactcattttacaaagtcagcattactctgataccaaaacctggagaagacacaatgaaaaaagaaaactataggccaatatcccagatgaaaatatatgctaaaatccttaaaaaattactagcaaactgaatccagctgtacatcaaagagataattcaccacagccaagtagactttattccttgtatgcaaggatagttgaacacacataaagaatacatgtcattcaccacataaacagaattaaaaacaaaaacatatgatcattttaatagatgcagaaaacgtttttgattaagtccaatacacctttattataaaaaccctcaagaaactaggcattgaagaaacatacctcaagataatgacatctctgataaacccagagtgaacatcatactgattgggcaaaagctggaagcattcttcctgagaaatggaacaagacaaggatgccctctctcactattccttttcagtataaaactggaaatcttttctggaatattcaggtaagagaaagaaataaaaggcatccaagtaggtaaagaaaaagtcaaactatctcccttcactgatgacatgattctatacctagaaaaccctaaagtctttgccaaaaaacttctagaactgataaaagagtttaagtaaagtttcagtatacagaatcaatgtacaaaaatcagtaacatttttatatatatcaacagtgttcaagctgagagacaaatgaagaatgcaatctcatttacaatagctataaaaataaaataaaataaaaaataaaataaaataaaataaaataaaatacatctgaccaaagcggtgagagatcggtacaaagataattaaaaaaacactaccaaaagaaatcagaaatgacacaartggaaaaacattccacattcaaggactggaagaatcagtattgttaaaatggacatagtgctcaaagcaatgtacagatacaatgctatcattggtagtttcctatcaaactaccaatgtcatttttcatagaattagaaaaagctattataaaatttgtctggaaaaaagagtccatatagccaaagcaatcctaagcaaaacaacaacaaaaataaacaaagctagaggcatcatattacctaattttaaactatactacaatgttactgtaagcataacaacatggtacttgtacaaaattgtacatatagaccaacggaacaaaatcaagaacctagaaataaagccgcacacctacaaccaactgatcttcaacaaagtcaacagaaataagcagtgggaaacaggctccctattcaataaatggtgctgtgataactggctagttatctggaccccaatttatcaccatatataaaaattaacccaaggtggattaaacacttagacctcaaagtataaaaattctagaagaaaacctaggatatatccttctggacgttggccttggcaaagaatttatgcctaagtcctcaaaagcaattttataaaaataaaaataaaaatcaataagtgagacctaattaaactaaagagcttctgcacagcaaaagaagctatcaatggaataaaaagataacctaaagaatgagagaaaatattcacaaactatgcatctgacaaagatctaatatccagaatttataaagaactaaaataattcaacaagtagaaacaaataatcccattttaaaaattgggcaaaagacataaagaaacacatctcagaagaagacatgcaaatatccaacagatatatcaaaaaatgctccacatcactaatcataagagaaatgaaatcaaaaccacagtgagataccgtattcatctgttctcatgttgctaataaagacataaccaagactgagtaatttataaaggaaaaaggtttagttgacccacagttcagcatggtttgggaggtctaaggaaacttagaatcatggccgaaggggaagcaaacatgtccttctttacatggcagcagcaagaattgctgagcaaaagggggaaataaaaccatcagatctcgtgagaactcactatcatgagaacagcatgaaggtaaccaccttcatgattaaattacctcccaccaggtgcctcccatgacatgtgggggttatgggaactataattcaagatgagatttgggtggggaagccaccaaacctcatcaaacagtatctcacaccagtcagaatagctattattgaaaagtccaaaacaataaatactggtgaagctgcagagaaaagagaacccttatgcacaattggtgggaatgtaaattagttcaaccattgttgggagcagtttggacttttctcaaagaactaaaatagagctaccattagacccagcaatcccattactgagtatataccaaaagagaaataaatggttctacccaaaagatagatgcactcatatgttcattgcagcactattcacaatagcaaagatatggaatcaacctaggtgcccatcaacaggattggataaataatatatggtacatatacaccatggactactgtacatccataagaaagaatgaaatcttgtcctttgtgttattatggatgcagctgggggccattatgctaagtgaattaacacagaaacaaaccaaatactgtacgttctcacttataagcaggagctaagcattgggtacttatggacataaagatgggaataatagacactagaggagggagaaaggtagaagggcaaaggctgaaaaactatctgttgtatactatgcttactatctgtgtgacaggatcaatcatacaccaaacctgagcatcatgcaatatacctatgtagcaaacctgtatgtgtacccccaaatctaaaataaaagtaaaaacaaaggaaaatagaaaaagataaacaacacagattagaagaaaatagaaaaagcatacagaaaattaatgaaatcaagagttgtttcttccaaaaggtcaacaaaattgacaaacaaaactttagctagattgactaaggaaaaaggagatactattcagatagctaaaattagaaatgaaagcaggaaccttccaaccaattttatggaaatgaaaatgattgtaagtattatgaaaaaggataacctagataaaatggatatattcctagaaaaaacaattcatcaagtctgagtcttgaagcaataaaatctcaacggtgtataactattaaggagactgaattagcaacttaaaacctccccacaaagaaaaattcaggtgcatatggcttgactgctgaattctcacaaacactaaaaaaaaaactaacatctgtctccctcaaactcttccaagaaacatataagtaggaaacactttcaaacttattctatgagaccaacattaccctgaggtcaaagccagaaaaaaacattgcaagaccaatatccctgatgaatattgatccaaaaatcctcaacaaaataatagcaaaccaaattcaacagtacattaaaaggtttcaacacctatgttcaaaatatgaatattgatcaatgtaatataccatattaacagaatgaagaaaaaactcacataattctctcaattgatgagaagaaacatttgacaaaattaacacacttttcatgataataacatgcaacaaactaggaataagaggaaactacctcaacctaataaagaccatatatgaaaagcccataactaatattatactcactgttgaaagattgggggggtgaagccaagatggccaaataggaactgctccagtctacagctcccagtgtgagcgatgcagaagacaggtgatttctgcatttccaattgaggtactgggttcatctcactggggagtgtaggaaagtgggtgcaggacagtgggtgcagtgcaccgtgcatgagctgaagcagggtaaggcatcacctcwcccaggaagtgcaaggggtcagggaattccctttcctagtcaaagaaaggggtgacagacggcacctggaaaatcaggtcactcccaccctaatactgtgcttttccaatgggcttaacaaatggcacaccaggagattatatcctgcacatgactcggagggtcctatgcccacagagcctcgctcattgctagcacagcagtctgagatcaaactgcaaggtggcagtgaggctgggggagcggtgcccaccattgcctaggcttgagtaggtaaacagagtggcctggaagctcaaactgggtggagcccaccacagcttgaggaggtctgcctgcctctgtaggctccacctctgggggcagggcacagaaaaacaaaagacagcaataacctctgcagacttaaatgtccctatctgacagctttgaagagagtagtggttctcccagcatgcagcttgagatctgagaacaggcagactgcctcctcaagtgcatccctgacccccgagtagcctaactgggaggcaccgcccagtaggggtggactgacacctcacatggccgggtactcctctgagacaaaacttccagaggaacgatcaggcagcagcatttgtggttcaccaatatctgctgttctgcagccaccgctgctgatacccaggaaaacagggtttggagtggacctccagtaaactccaacagacctgcagctgagggtcctgactgttagaaggaaaactaacaaacaggaaggaaatccacaccaaaaacctatccagccagagagaaaggtcgagttatctacaaagggaagcccatcagactgacagcagatctctcggcagaaatctagaagccagaagagagtgggggccaatattcaacattcttaaagaaaagaattttcaacccagaatttcatgtccagccaaattaagtttcataagtgaaggagaaataaaatcctttccagacaagcaaatgctgagagattttgtcaccaccaggcctgccctacaagagctcctgaaggaagcactaaacatggaaaggaactactggtaccagccactgcaaaaacatgacaaactgtaaagaccattgatgctaggaagaaactgcatcaactaacgagcaaaatagccagctaacatcataatgacaggatcaaattcacacataacaatattaaacttaaatgtaaatgggctaagtgtgccaattaaaagacacagactggcaaattgaataaagagtcaagacccatcagtgtgctgtactcaggagactcgtctcacgtgcagagacacacataggctcaaaataaagggatggaggaagatctaccaagcaaatggaaaacaaaaaaaaggcaggggttgcaattctagtctctgataaaacagactttaaaccaatacagatcaaaagagacaaagaaggccattacataatggtaaagggatcaattcaacaagaagagctaactatcttaaatatgcacccaatacaggagcacccagattcataaagcaagtccttagagacctacaaagagacttagactcccacacaataataatgggagactttaacaccccactgtcaacattagacagatcaatgagacagaaagttaacaaggatatccaggatttgaactcagctctgcaccaaacagacctaatagatatctacagaactctccaccccaaatcaacagaatatacattcttttcagcaccgcaccacacctattccaaaattgaccacatagttggaagtaaagcactcctcagcaaatgtaaaagaacagaaattataacaaactgtctctctgaycacagtgcaatgaaactagaactcaggagtaagaaactcactcaaaaccgctcaactacatggaaactgaacaacctgctcctgaatgactactgggtacataacgaaatgaaggcagaaataaagatgttctttgaaaccaacgagaacaaagacacaacataccagaatctctgggacacattcaaagcagtgtggagagggaaatttatagcactaaatgcccacaagagaaagcaggaaagatccaaaattgacaccctaacatcacaattaaaagaactagagaagcaagagcaaacacattcagaagctagcagaaggcaagaaataactaagatcagagcagaactgaaggaaatagggacacaaaatcccttcaaaaaatcaatgaatccaggagctggttttttgaaaagatcaacaaaatggatagactgctagcaagactaataaagaagaaaagatagaagaatcaaacagacgcagtaaaaaatgacaaagggtatatcaccaccgaacccacagaaatgcaacgtaccatcagagaatactattaacacctctatgcaaataaactggaaaatctagaagaaatggatcaattcctcaacacatacaccctcccaagactaaaccaggaagaagttgaatctctgaatagaccaataacaggctctgaaattgaggcaataattaatagcttaccaactaaaaaaagtccaggaccagatggattcacagccgaattctaccagaggtacaaggaggagctggtgccattccttctgaaactattccaatcaatagaaaaagaggaaatcccccctaactcattttatgaggccagcatcatcctgataccaaagcctggcagagacacaaccaaaaaagagaattttagaccaatattcttgatgaacattgatgcaaaaatcctcaataaaatactggcaaaccgaatacagcaacacataaaaagcttatccaccatgatcaagtgggcttcatccctgggatgcaaggctggttcaacatacgaaaatcaataaatgtaatccagcatacaaacagaaccaaagacaaaaaccacatgattatctcaatagatgcagaaaagtcctttgacaaaattcaacaacacttcatgctaaaaactctcgataaattagttattgatgggaygtatctcaaaataataagagctatctatgacaaacccacagccaatatcatactgaatggacaaaaactggaaacattccctttgaaaactggcacaagacagggatgccctctctcaccactcctattcagcatagtgttggaagttctggccagggcaatcaggcaggagaaggaaataaagggcattcaatgaggaaaagaggaagtcaaattgtccctgtttgcagatgacatgattgtatatctagaaaaccccattgtctcagcccaaaatctccttaagctgatatgcaacttcagcaaagtctcaggatacaaaatcaatgtgcaaaaatcacaagcattcttatacaccaataacagacaaacagagagccaaatcatgaatgaactcccattcacaattgcttcaaagagaataaaatacctaggaatccaacttacaagggatgtgaaggacctcttcaaggagaactacaaaccactgctcaatgaaataaaagaggatacaaacaaatggaagaacattccatgctcatgggtaggaagagtcaatatcatgaaaatggccatactgcccaaggtagtttatagattcaatgcgatccccatcaagctaccaatgactttcttcacgaattggaaaaaaactactttaaagttcatatggaacctaaaaagagcccgcattgccaactcaatcctaagccaaaagaacaaagctggaggcatcacactacctgacttcaaactatactacaaggctacagtatccaaaacagcatggtactggtaccaaaacagagatatagaccaatggaacagaacagaaccctcagaaataatgccgtacatctacaatcatctgatctttgacaaacctgagaaaaacaagcaatggggaaaggattccctatttaataaatggtgctgggaaaactggctagccataygtagaaagctgaaactggatcccttccttacaccttacacaaaaattaattcaagatggattaaagacttacatgttagacctaaaaccataaaaaccgtagaagaaaacctaggcattaccattcaggacataggcatgggcaagcacttcttgtctaaaacaccaaaagcaatggcaacaaaagccaaaattgcaaatgggatctaattaaagtaaagagcttctgcacagcaaaagaaaccaccatcagagtgaacagacaacctacagaatgggagaaaatttttgccacctactcatctgacaaagggctaatatccagaatctacaatgaactcaaacaaatttacaagaaacaaacaaacaaccccattcaaaaaggatatgaacagacacttctcaaaagaagacatttatgcagccaaaaaacacatgaaaaaatgctcatcatcactggccatcagagaaatgcaaatcaaagccacaatgtgataccatctcacaccagtagaatggcgatcattaaaaagtcaggaaacaacaggtgctggagacgatgtggagaaataggaacacttttacactgttggtgggactgtaaactagttcaagcattgtggaagacagtgtggcgattcctcagggatctagaactagaaatgccatttgacccagccatcccattactgggcatatacccaaaggattgtgaatcatgctgctataaagacacatgcacatgtatctttattttggcactattcacagttacaaagacttggaaccagcccaaatgtccagcaatgatagactggattaagaaaatgtggcacacatataccatggaatactttgcagccacaaaaatcgatgagttcatgtcctttgtagggacatggatgaagctggaagccatcattctcagcaaattatcgcaaggacaaaaaaccaaacaccacatgttctcactcatagatggaaattgaacaatgagaacacatggacacaggaaggggaacatcacacaccagggactgtagtggggttgggggaggggggagggatagcattgggagatatacctaatgttaaatgaggagatgatgggtacagcacaccaacatggcacatgtatacatatgtaacaaacctgcacattgtgcacatgtaccctaaaacttaaagtataatactaataaaaaaagaaagattgtaatcttttcctttaagattatgaacaagataaaatggtgagaggtgcccctgtcaccatttctattcaccacagtacttgaagtcctaatcagagcattagacaagaaaatgatataaaagacattcagttgttctctgtctttgcagattacatgatcatatatgtggaaaaccctgaagattaacatacatacacagaaacctcttagaactattaaatgaattcagcaaagttgcaggatacaaaatcagcacaccaaaattattttgttttttatacactggcaatgaacaactttgaaaggaaattaagaaaacaaattccatttaaaatagcattgggaataataaaatacatattaattaacttagccatggagatgaaaggcttatacctgaaaattacaaaatattgctgaaaacaaataaatgggaaatcatcctatgtttgtggattggaagacatattactgttaagatgttgatactacctagggtagtctacagattcagtgcaatccatatcaaaaccccaaaacatttttgcaggaatagagacaacctgttgagttagagaaaatatttgcaaactactcatccaacaagggactaatatccagactatacaaggactcaaacaactcaacacttaaaaaaacacaaagaatcccattaaaaagttggcaaaggacatgaacagacatttctcaaaagaaaacatacaaatgaccaacaggtatacaaagcagtggtcatcatgactaagcatcagggaagtgtaaaccaataccacagtgagataccatcttaccctagttagaatggctattactaaaaagacaagcaacagatgctgggaatgatgcagagaaaaggaaactcttacacactgttggtttgaatgtaaattagcacagccattatgaaaaactgtatggagatttttttcaaaaatctaaaaatggaattaccatatgatccaacaakcccactaccaaatatttatccaaaggaaaagaaatcagtatgtcaaagacatacctgcacttggacgtttattgcagcactattcataacagcaaaggtatggggtcaacctaaatgtccatcattgaatggatggataaagaaaatttggtatgtacacacacacacacacacacacacacacacacacacacatacacagtggaatactatctagccacagaaaagaatgaaattatgtcatttgcagcaacatggatgaattaataaagtgaaaagacaaaaaaggaaagaaaaacctatcctaaaatttatatggaatcttataggatctgaataatcaaaataatcttgaaaaggaagaagaaagtatgagttatcccactttctgctatcaaaacttatttacaaagctctagtattcaaaacagagtggcataaagatagataaataaaccaagagggtagaagagagggaccagaaataatctctcatatatgttatcaagggtgccaagagcattcaatccggtaaacgacagtgtttttcaacaaatggtcgtagtggtgggggtactggatatccacgtacaaaagaataaaatttgattcttgccttataccatatgcaaaaattaaataaaaatggatccaagttctaaatgtaagacctagaactaaaaatcttttaaaagaaaacaggagaaaagcattatgacattggatttggcaatgatttcttgaataggacacccaaagcacagacaacaaaagaaaaaaaatagataaaaaaactacatcaaaattaaaaactgtgcatcaaaggaacattcaacagggtgcaaaggtgcaaaagcaacacacagaatgggtgaaaatatttgcaaatcacatatccgattggggttaatatccagaatatataaaataagtcctataactcaacagcaaaaaacaacccaattcaaaaatgggcaaaatacttgaatagatatttctttaaagaagatattcatgtccagcaagcacatgaaaagatgttcaacatgactaacattagggaaatgcaaatcaaaaccgcaatgagacagcacctcacactcattaggttggctgctattcaaaacaaacaagcaaaacaaacaaaactgagcagaaaataaaaagtgttggctagcatgtggagaaattagaacccttgttcactgttggtgggagtgtaaaatggtacagctgctatggaaaacagtatggtggttcctcaaaaaatgagaaaatgattactatgtgattcagcaagtccacttctgggtatataccccaaagaattgaaagtagggtctcgaggagatagttgaacacctatgttcatattaacattattgrcaatagctaaaaggtgaaagcaacctaaatgtccattgatggatgaatggataaacaaaatgtggcatatgcctatgatggaatattattcagccttagaaaggaaggaaattctgacacatgctacaaatatgggtgaaccttaaggacagtatgccaggtgaaattggccagtcagaaacagaaatactgtatgactctacttatatgaggtacccagagtactgaaatatagagacagaaagtagaatggtggtttccaggggctggagggaaggggaatgggcagttagtgtttaatgagtacagagtttcagttttgcaagatgatgagttctgaagatggatggtagtgctggttgcacaatattaatgtactcagtaccacttaactgtacacttaaaaataattaaggtggtgatatggtttgactgtgtccccacccaaagctcatcttaaactgtagctcccataattcccacgtgtcataggagggacctggtggaaggtaattgaatcatggggttgggtcttttccatgctgttctcatgattgtgaataagtctcatgaaatctaatggttttataaaagggagttcccctgcacacactctcttgcctgctgccatgtaagacatgacttgactcctcctttggtttccggcatgattgtgaggccttctcagccatgtggaactatgaatccactaaacctctttttctttataaattacccagtcttgggtatgcctttattagcagcgtgaaaatggaataatacaggtggtaaatttcatgttatgtgcattttaccacaattaaaaataataaaaagatgatcatgggcttctagttcaattattccatttcttctccaaattataatcttaccaaaggaaaaaaaaacaaatgagatttaaactgccaagaacaagggcaaggtgagggtctttgggccttataattgatgaatatcttgccaaagtaacattacttagagtttcaaattgctgaacgatgaccaataaatttgagaggaggagggggatgaaagagcacagtgtcagggagctagttcttctatgttttatggaaggatgttaatagattttccttcaaattaataaaattaggacaagtagtatatattttaattgagataactgtagaagaactaaaacgtatttgatcaaaagtgataatttcagcaagctaacctgggatagtagaaatagattaggaaggcctaaattttcatattgtactctttattatcatttaaagcattttttatgcacatacattgctttagttttaataattctaaaattctcacataatatagcagagtataatgagaaatataataaacaccttttttcttaatagctagatttttcaaatcataacattttaccatctgtgcttcagatatttgctaagaaacaatatattacagatacatttgaagtttctacctaataattcctctccttccccaggggaggttggtgttttttatattatatttatgatacacacacattttaaatcaatatatgtatcatatataatacaaatggtaaagcactaaatattttttccatattttaaaatttatgtaaatagcattatactttctatattctgcaattttcttttattgctcagtgttctgtttgagaggagtggttttgaggccttgaagtaaaaattatgatttattgcttttgttatttatttatggggataaataattatgtgataatataatccataagtattactgctatgtaacttgtatagataacattttataatcaaagacatttacaaactttgtatcaaaatgataattggagtcctgtttagagaacaaactaaaaaactttggcagaaaggagaagcctgttttttgagaaatgattttgtttttgctttaaattggataagtttttctggaccatagctaatgtcaattttcataataatatactggttgcataatccatttgccagtttgtcttggctgaagaagttactgaaggtgaataaaattgtaagtttttctctccttgggaacagtttctgagttattgagagaaaaggagcccaagtaccttagtgaatgggtcccggtgaccccacacaaagttgtaggagctgagctttcattagaaatagtgtttgtcccagaatattctatgcgccattttatttagtttcttctacagtcctcagaaatagacattattttctcattattcaaatgaggtaattagagcacagaggtttgcaaatcacccaaggtcacccaggtacatggtagaattgggacttaaagccagttcttttttcctccagtgttctttctattcctgccaatgcagataaacctttgaaaaaatgtaaaagtctgacttgggaaaaggaatttagtttattttactttccaatttctcagtctgattttcacaaagagagttttttgttgttgcttgtgaataggtttctatatatttttattggccctagctatgtgactcttctcaaagcctaaaaacctgaatgtattttcaaactgataatggtcacttctacccaacattatgagctttgtcaatacgttttcctcatcttctgtcatacatatgcatgcttattttattttttacatatttatttcttattttctccccccaaattcacctccctcattgtccaaattcaatacagctatggtattggcaatatctactttgccttcttatgatgtggtcatttgtatcaaatgagaaaacaaatgttgtttcaaagtatgatgagctatacaaatgaaagagatctagaaactgtatttcagtctgaagtttaatgttactctctcttatgccaggataggattaccagtgatgtcagtgaacagaaaaagagatacattttcccacagttttgttctttgaaaaactatgttttgttctctgtaaataaaggggaaagaatgattttatagataatgctttcatttgcatgtaagacagcaaaattcaacggaccaattacaatcatgcatttttattttggcaaacttttttcttgccatttaaaattcgtaaattttattgtatataacccagtaaagttgattttagaaatctctaaaagttaaaaaaaaacccaaagaatgtcactatttgcaaccacttaagatctaagtattaagcatctgtggctgctaacatcacaaaaagagagacaactagacactatgtgccttttgctgaaagatcgtaccactacctagggtcatacccaaaacagatacttgcctctgatcaatcatctggatccaacaacgaatttacaagttacatagcagccagaagatacatggaactactctatgggaattcaatcagccaaacccatatcgtgagaacatttatagaaaaacaaccttcatcaagtaaattttaaggataaaatagaagagatagagggcaagatagaagagatagagggaaaacttgcacattcaaagagatttaggtatctatcacattgaagagattataattcctcatcttgttgatgttcatgccttttgctgtctaatgttacagtacccctccaccataggaggggttacctgttctaccccttgacactgggctcagacactctcagcatttcctattattaacatcttatattagtatatggtagatttttgtgattagccaaatatttatatattattattaactaaagttcataattcactcagatttccttagtttttacctaatgtcccccctttttttgtcccagaattccatccaggaaaccacgttacatgtattcatcattttcttggactcttcttggctgtggcactttctcagactttccttgtttttgataaccttgatagttttgaggagtactggtcaggtattttgtagaacgtttcttaattgggatttgtttgacatttttctcattaaagtcagtataaggatttttgggaagaaggcctcatactatcaacatgacatcactgttgatgttgatcttgctcccctgactgaggtgatgtgggtcaggtttctccactcataagttactccccctctgcttttcctactgtactctttagaaagaaatcactatgcaaggctaacatttaaggagtagggagttatgctccctctgcttgaaggcagaatgtctatataaattctgcatgggagatttgtctgtttttccccattaatttattcaatcattgatttatattagtatggactcatagatatactttggattataattcaacactgatttattttgttgttcaaactcttccatctgatgatagtttattttgctgtgcagaagctctttagtttaattagatcccatttgtcagtttttgcttctgttgcgtttgcttttggcattttcatcatgaaatctttgcccatgcttatgtcctgaatgttattacttagattttcttctagagttttacatttaaattttgagttttacgttgaaggctttaatccaccttgagctgatttttataaatggtttaaggaagggatacagtttcaattttctgcatatggctactcatttctcccagtaccaattattaaatagggaattctttccccattgcttatttttgtcaggggttgtcaagatcagatggttgtaggtgtgtggtcttatttctgagttctctattctgatccattggtctatttgtctattcttgtaccagtaccatgctgttttggttactgtagctttgtagtatagcttgaagttgggtattgatgggtattgaagctgggtatgatgcctccagctttgttcttttgcttaggattgtcttggctattcgggctcttttttggttctgtatgaattttaaaatagttttcttctaattctgtgaagaatgccaatggtagtttcatggaaatagcattgaatgtataaattactttgggcagtatggctgttttcacaatatttgttctttctatccatgagcatggaatgtgttttccattcatttgtgtcctctctgatttctttaagcagtggcatgtagttctccttgaagaggtcctttgcttccctggttagctgtattcctaggtaaacacaatttgaattgataagagggatatcacactgactccacagaaatacaaactaccatcagagaatactataagtacctctatgtatataaactagaaaatctagaagaaatggatgaattcctggacacattcaccctcccaagactgaacaaggaagaaattgaattgctgaatagaccaataacaagttctaaaattgaggcagcactacctagtctaccaaccaataaaagcccaggatcagatggattcacagctgaattctattagaggtacaaagaagatgaggtaccatttctactgaaactattccaaaaaattgaaaggaagggaaccctccataactcattccatgaggccagcatcattctaataccaaacctggcagagatacaacaataacagcaacaacaacaaaaccttcaagccaatatccttgatgaacattgatgcaaatatcctcaattaaaaattggcaaaccaaatccagcagcatatcaaaaagttgttcatcacagtcaagttggcttcacccctgggatgcaaggttggttcaacatatgcaaatcaataaatgttattcatcacacaaacagaactaaaggcaaaaaccacatgtttttctcaatagatgcagaaaaggcctttgataaaacttaacatccctttatgttaaaaactctcaataaactaggtgttgaggaaacatacttcaaaatagtaacagccatatatgacaaacccacagccaatatcataccgaataagcaaaagctggaagcattttccttggaaactggcacaagacaaggatgccctctctcaccatttctattcaacatggtattggaagttctggccaggacaagcaggcaagagaaagaaataaagggtattcaaataggaactgtctctgtttgcagatgacataatcctatatctagaaaatcccattgtttcagccccaaagcttctaaagctgattagcaacttcagcaaagtcacagaacacaatgtcaatgtgcaaaaatcactagcattcctatacaccaacaataggcaagcagagagccaaatcctaaaagaacttcctttcacaattgctacaaaatcaataaacttaccaatttttttctctcatagattttgcttttggtgttgtgttaaaaacttatcaaactcaaggtcttgtagattttctcctgtttccttatagaaatttcacagttttacactttacacttaggtctacactctagataatttttgtaaaaggtataagacttgtatctggattaattttttcacatatggacattattttttcagcattattttataaaaaaaacttttctttctctattgaatttttttgacataactcagttgactttatttgtgtgtgtctttttctggggtctccgttctattcaattcatctatatatctattcttttgccaatacgatcctgccttgattatggtagctttgtagtaagtcctgaaattcagtagtatgtcatctaacttgttacatttctccagtattatgttggctattgtagacgttttgcccttccatatagacttcaggattagcttgctgatatctacaaaatagattcctaggaatttgattggattcccttggctctatagataaagttgggcaaaattgacatcttttttttttttttttttttttttttttgagacggagtctcgctctgtcacccaggctggagtgcagtggcgggatctcggctcactgcaagctccgcctcccgggttcacgccattctcctgcctcagcctcccgagtagctgggactacaggcgcccgccactacgcccggctaattttttgtatttttagtagagacagggtttcaccgttttagccgggatggtctcgatctcctgacctcgtgatccgcccgcctcggcctcccaaagtgctgggattacaggcgtgagccaccgcgcccggcccaaaattgacatcttgacagtattggatattccaatccatgaacataattttttttatcaatttatatattttttatattttcttttttcatcagagctttgtagttttctacttatacatattttgttagatttatccctgaatatttcttttcttttttttcctctctagttttggtgcagtggcaagtggtattgttttaaaatttcaaattccaattgttcattgatggtacgtaggaaagcaatttacttttaaatactgaccgtgtatcctggatccatttatttccaaatatatttagatttctctttagatttctttcatgactcatggcttattctaaagtatgctgtttaattctcaaatatctagggattttccagctatttttctgttattgatttctagcttaattccattgtggtctaaaaacatactttgtatgatttttattcttttacctatgttaatatgtgttttatggctcatgatgtagtctgtcttggtgaatgttctgagttttagaagattatgcattttgctgttattggatggaatattctataaatatcaattagatcaagttgattgataatgattgataattcagataatctatggtcttattgattttctctctacttttcctactaattactgaatagaagtgttgaagtctctaactataatggagtatttgtctaattatcctttcagttctttcagtttttgcctcacatgttttgatgctctgttgttaggtgaatatatcttcacaaagatattggagaactgactcctttatcattatgcagtgctcctttttactcctgcttattttatttgttttgaaatttgctttgtctgaccttaatatagctgccccagctttctattgatatatgtcagcattgtatattcttcttcatccctttacttttaatctgagtcttttaaaatttaaagtggactgcttatagacaacatagattgtatcttaatttcttatcaactctgaaaatctcttttatttggtgtatttagaccagtttgttacacttaaagtgatggttatttatatatttagacttacaggtaccgtgcttataaatgttttctatctgttgcatttattctttgtttcttctttcccctctttttctgccttctgtgtttttaactgggcattttatatgattccattttatcccttctcttagcatatcaattatacttttaaagagttcgagattgctctagagtttacaatatatgttttaactaatataagtctaacttcacataacagtatgccacttcatgtagactatagttgctttataatagaatattattccccattcttccctcctgcccatttcactgatctatatgctgaaattacttattatattgctatcattaaacagtcatctattagtccacttaagtataagaaaaataaaatattttgttttaccttaatttattctctcatttctctctctttccttgtagatccatgtttctgaaccacatgattctccttctgcctgaagaacttctttaaacttttcttactgtgtctgcaggtgatgaattacctcagtttttgtttgtcttataaagtgtttatttctctcctaattttgaagggtcattttgctagatatacaattctaagttggtggattctttttctttcaacactttaaatattcactccattcttttcattcaattcttttcttgcttgcatggtttctgagaagtccactgtaattcttatttttgttcctctacaggtaatatgttttttcctctggttacttttaaggttttctctgtttttggttttctgaagtttgaatatgataggtgcaggggtggttttttgaaggtgggggtgagggttgctatattagtccattttcacgctgctgataaagacatacctgagactgggcattttacaaaagaaagaggctcaaatggacttccagtttcacatggctggggaagcctcacaatcaagtgaaaggccaggaggagcaagtcacgtcttacatggatggcagcaggcaaagagagagcttatgcaggaaaactcccccttataataaccatcatatcttgtgagacttactatcatgagaacagcatgggaaagacctgcctccatgattcaattacctactaccaggtccctctcagagcatgtgggaattcaagatgaaatttgggtggggacacagccaaaccatatcagttacttatactatttggtgttctctgagctttctgggtctgtttcagtttctgtcattatttttggaaagttttcagccattattacatctaatatttcttctgcttcattttttccttcttctactgatgttacaccttttgaaattgtcccacagttcttggacgtcctgttttgttgggttcatttccctctttcttttttttctctttgcagttcagtttgagaagtttctattgccttatcatcaagctcactgattttttccttggctatgttcagcctactgatgacctcatcaagggaatcctttacttctattactatgtttttgatttctaacacctccttttgagtctttcttagagtttccacctatcttcttacattacgcatttttatatgttgtctatctttttctgttagagcccttaacatactaatcatagttattttaaattccccatctgataattccaacatctgtgtcacatctgagtctgactctgatgattggtttgtcttttcggactgtttttcttgtcttttggtattcctcatagcattgtattgaaagctagacattgtattgtatactaggggctgagataatatgtttttagtgagaaaatttatgttaatatgggtttaatatttgttgtagctatagctgccacagatttcagaaccattcagtgtccttgtttttgcctctatccttgagggattcctaaattctcttcttcagagaaagtcagtgtcttgtagctcttttgtatgtaatcaattattattatactggagctcgatggtttggtagtaaaaggtggggaggaatagcagtctatatataatgttaaaattacatctcagtgttttggtgaaggggaatggtctgtaccttttggctatgaccatcaacactgtcttcccagtggtacagctttttttttcttttctttctgctccctcctccctttcttggatgcagtcttcctagtccatttcgttgaagccctggctcctgttgattatttttttatctgaggtgagacaggaaagctagaagggcttggaatgggtggaatgaccgtccctcatgtaacataacctcaaaaaatgcctcttctcttaaatagtaggcctttattttaaagaaggctcaaagattacaattattcctctttccctctcccttcggaggcatgatgggatgattatctgttgggtttcctggagataaagctcctgaaaatttaggggtctgcctcagacctcagccatcaaggagtttctcatgctcatgttagttcacgctcagtctccagcaattcaccaaaataattacttaagtgttcctaccggatgatggctcaagaagcttaagtttcaggtaagcagatcttagctgtgcctctctgtaaatgcctgtctctctggatttgggggtattgatttatgctgaaacttcaatttccttatgggtccaagaaaagtcattgatttacaaatttttcttgctgtagacagaagtgataatatccaagccctttacatgcagctgaacctggaagtttctttgttttaaagttcttcatacaggtttcacacatgatttgctaagtttattcctatatacttactctccttgttgatattgcaaatgaggttttctctaccattataatctttaacaggtttgctcctttaaataaggttgctgatttcaccatattatttttatattctgcaacttcattgaattatttcatgggtaacgcttcttgtatcattgattctctaaagttttttaggcatactattaggtttgtgcaaaagtaaatgtggtttttactgttacttttaattggaaaaactgcaattacttttgcaccaaccaaatattattgcgagtagcaataattttactccttctttaccaattcttatacctttaattggtttctcttctttaattgcataggtaatacctctgatacaatggtgtatagtcataaggatggtggtcatccttgtcttgtttataatcttaatgaaaatggttctgatattttcccatttagtaagatattggcttaggatatctatctatctatcttatcatgctaagaaagaaattttaagtttcttttttttttagtgttttcaccaggaatcagtattgaatttcatcagaggatttttcattatctatggagatacataattttttttcttagatttaataatgtggattataataccaatrggttatctaatattggaccaactttgcattctgaaagaaattccacttagttgtgttgtattgatttcacaatgtataagattctgtttgctaatgttttagttggtatttttacatcaatatccataaacatactgctctgtaggtttttttttgtatttttaaaaatttagatttaggtattagtgtagtacttgcttcttaaaaattgggaactttttattcatctttaatgttctgcagcactctataaaacattggaaatatcaaatctttgatgattcggtagaatttttttccaaagttatctgggcaaggtgctttttkgttgatgtttttcttaataacttactttttatcttctatggaaaatgttgtctatctataactgagtcaaatatcatttattttattgccctaagaaattatccatttcctctgttttcaaacctatttgcatagaggtctgcaaaatagtcacgatattttaaatttttgtttcagtggttgtttccccttgtcatcttctatttttttattttataatttctcctctattttattaatttcttcaaacttacaggaatttgatttcaatggcaaaagatttatatcaaatcttaagagaaaccagagtataggaattcgattaataagtctactgtttttctatttttaattgattaatttctacttttatctaattttatgcttctttgtgctttctttttacttttttattgttttttgagctgggtttttaatttcttaatttcgttaaaaatttttaaatcagaaatatttagtttatttagttctgtgacttttcctctaaatactaatttcaatacatctttccattattatttttcagaaattttgtcatgtaagtttgtattttccctttaggtagaatgttttctaataaacattttttcttaaaatttgcgtggaagagtctttttgctctttaattctgttarcaatttctagtttttattgcattatgatatttattgttgtgatatttctactttttgaaacttactgatattttctttgtgacttaatatttgattatgttttgtaaatgttttattgcacttgagaagaggtgtattatttactgtatggctgtaagtttggtatatgcttataaagtttggtatatggttataaaatctaccctgttttacatgttgtctagatcttacaactctttagtattaagttgtgacttttagcattttcgttatatttaatttttttggattgaattctagtttggctgatagcagattacatttcctgatttcttattgtttccattgactttaatgttttgttcatctcttaattttagattttctgattcaccttgttttatgtatgttttttgtatgtagcatatagttacatcttgctctgtgtaccaaactgaaaatcctttccttttattaatagtttagcccatttttttacatttatatttagcccatttatatttatattgatatggttgcaatttttattttacactctgacacaatagtttatagttatgtatattttaagttatttgctatgtttctctttctccctctgcatgatgtgtcttttttgccttttaatatttttctaggtatgcttttgtttaccacaaaagtggccagcagggtaagaccatgagaaaacatgcatggggatttggtgtttattctttttgttacttacagttatcatgaagtttgggtattctctatgttcagcttatgctgagggcataatttgcatagtttcatttttcttattatttctctttattgcttttagttgtagacaggaacccagacagttgctatcttcctccatgacctagaattctggcttctagaaatcataagaatatttcccactgtagtctgacatgccaaatgtagctgtagcagtaattaaattggtggggggattttagtaattcggttgacagcttttgggaaatgacattggctggattaaagaccataggaaacccagaaagtttttatgctgctatactagtaaaactgccattaatgtggactgttcaaaatgctgaaagacatatggaacctcaactttctacaggcaagaagcaggctgagaaagtcgttcaaagggtatattttttcatgttctcttcaaaaatggccaaatagggtgatggaaaaagaagaattccaagaacatggagccaagggctgtggaaaacaactgactgaggagccactcccaggaagccaaactggggcattatcagaaaatattattcatcctaaaaatagacccgccatccagtgggattgtagaattgctatgtaccagtgagtacaatgtgcctcctctctttccctgtgtgaatggcagtgtttattgtgactattttgcctgatttcgcctgatttcaccactatatgatgattcgtcttttaattcataggcctctagatggggacgacccatatctatacttgtggtggagagtgtgttgttctgcctagatacccctcaggaatgaaggacttatgttctcatctgctgggagtgctcgtgaaagatagtccttagttgtcatccctcctttgggcttttccaatggcttatttcccaaggtcatatattcttacagggactgctctgattcacgttgggcatgaagttccagccctttatacccaaaattatgaggggccactctaagctgtagaatttcttttgggttacctggggctatcttggaactgaatcacagatcaacatctccatctgtctgatccttcttttactgttttctacaagtgtttgtctcaagagtactcccaaataattatagggcgtgctaatttctttctcaggttatacgttccaggaaacctaatctgcatcaagtcctgatatatgtctaccacaagttgctgaattttaaacttgatgctctgtgggatgagatgttttagggagtcttgtgagtgtcaccactcactaaatatatctcagcatgtatgtgggaatgaataattgtagtcatgagtaaagactatggtagatggtaaagatggctccattttttcactgctccctatattcatgtcttttgccatcttactttgcagtgttcctccattctgacacagtacatggccacgtaacttgctttttcctaggaggaagtagaagtggcagtgtgctaatacaaacctaagcctcagaatgtcttatatatttgctttttgttgttggctttagtttttttttggctgtttcatttctgcacttcagcctgctgggaactgggaaatagaaggaatatagccaagccatcaagatcatccaagctgaggccagcatcaaggagctggaagcctataaatgcagatatatgagcgagctctgctaacatcagtagtgctcccaactgactactccagacgtcgttagaacttactgctgtgtactactgtagttcattttgtggttgtttgttatgcagcattattatagtaatagagatgggatacaagggaagaaaaaactatgatgtgtgtggatgcccccttggtctataaaggtataaagatacctaggtgagtaaggtaaagatcagagtgtcagtaatattgaggagagaggaggactgtgtctggaacaaggcttatgaagagcggctcaagtggctgaaaaagttatatttcttaaactgggttgtgtttagaagggtggtaatcattcatttagctacacatttttaaatgtagattttctctacttattgtattttatggtgaaaaggttaaaataattttttaaaattacacaattcaaggctttaactttatagcaagagaaatatatatcctagagaggttaagaggaacaaatggaagttagcagcaggacaaggattagcatccagaccaaacattatgtgaataaatgagaaaaataatatcaataaaaggaagtgatattttcatagagaaggacacagaattggacgtagtggctgatatttgtaatctcagcagtttgggaggttgaggtgggaggatcacttgaggccaagagtttgagactagccygggccacatagtgagaccctgtctctacaaaaaaaatttttaaaaatagctgggtgtggtggcatacaactctagtcttagctacttgggtggctaagacatgaggattgcttgaacacaggaatttgaggttgtagtaggctgtgatcgtgccactgcacttcagcctgggcaacagaacaatatcttacatctacagaaagagagagagggaaggacagaaataatgagctatggaaaattgcacactaaaggtgttaaaatgtttttttatcaggggaggatacgaaatctttttctgaagttttcaagaaaatcatatttttgaaatgataaaatgtatccctgtcaagaggtgagagtttctattaggaaatggttgttaagcatcacaattccgtgtctccctatctaaacactttctatacccaccaagaagatagattcacatgatccatgtatgcaaaatcttattgacagaaatggactttgacctaggaaattttccatcctctctacccaggcttccagggacaccatgaatgattcttttagccttagatgatgtattcagaaccccctcttttacattataaatacatggctcacgttagaaaaattcttgtagtaagcataggttctaccagaacatgtatatcttatttgctaactgcaaattgtactctagacagttattaccagtggtgttctcaagtctgtctagtgaacgcctcaaatacattttattgacaaatgtcagaagttactgcacaaaattgtaaagccgtttggttctgcaatctgtaagattattcttcagtagaatcaaatattttacttaaattctcccctaccttctattacctttccatatatttttatattttgttagtatcagggttgaatgatatcaaacaggagtatctactaaaattattagtgattctaaataattagtgtgaatatgcaaattcagaaggttcagttggtatttttacagtttaccatgactcaggttaaacatcaacaggtgtggactcttagagtctatgtacctggtccatttgccctaggttaaaatgaaggaaacaactgatacccccaaaatgtggaaggacttgcccaagcttgttaggtgttcatccagacctggaaagaatctaccttatgataggccagtcctcttttcaatgtactagtcaggctctcattaactttgacagagaagatgagaaaatttatctttaccattaaaatggtgtcttaataaaaacggtgtgtttccagaatttctcttaggggaggtttggggagagaatatggcaatggaggtggcttaggtgcttgttttgaaattgcacttaaaagtaagataaggtttttacttagattgggggtggggtggggtggagtagcaaaatacctcttggcttctgcactgattaagactaattattattattattattgttacagggtcttactctgtttcccaggctgagtgcagtggcacaatcagggctcactgcagcctcaaactccccggctcaagcaattcttctgcctcaaccacctgagtagctgggactacaggtgtacaccaacacacccagctaatatttttattttttttgcagagacaaggtctcactatgttgtccaggctggtctcgaactcccagactcaagcagtcctcctgcctcagcctcccaaagtgctgggattataggcatgagtcaccatgcccaaccaagactrattatttttggaacctgttttaagatgtgttggcattctcaatcaggtttagaatagttgtatagactatacacgaagattcaaaacatttcttaaaatattctatttttagccagtttgcatttaagtactttaaaaagggggcatttcatcagagacaatgctaggtatatttaccttactatatccatggctctatgttttctaacactgtgtaatttactcttttctaatagtatagaaggaggctatgactcttaagtaggcagtttgagaaaagaaaatatctaaaagctgctctttagggataaactgataataacaacaaagtgttattaaagaaactcaaagaagttacatatacacctgctttttttttctttttcttttctttcttttttctttctttcttttttttttttattttttttttatttgagatggagtctcgctctgttgccaggctggaatggaatgcagtggtgggatcttggctcactgcaacctctgccttccgggttcaagcaattctccagcctcagcctcctcctgagtagctgggattagaggcgcatgccaccacgcccagataatttttgtatttttagtagagacagcgtttcaccatgttggccaggctggtcttgtactcctgacttcgtgatccgcctgccttggcctcccaaagtgttgggattacaggcgtgagccaccgcacccggccccatatacacttgttttaaatcaacatttctctgtgtggataagataaaaattcaatgtgtattctctgtgaagcacacaaaaggacaagtcttcaatttaaaggatctaatagccttcgagtctcttgagaatctagattaatagaggttactcagaaaattgcagaacataggaaatccagctagtgaacctgtaacacttggatccaaaagctaaaatcctctcatgaggaaaagcaaacaaagacaaatatccacagatgtaataaaatacccatgacataagtatttcctgttgtgtttttggcttcacaaatacagtatgggtttatatatctatcaattatatcaacttaaagtgtagattatggaaaaacctacatttattatcaccatccaacagttcccatatttcctcatgatcctgttacctataagcatcaaaatgcaaagctggcttccacctgtggaaagtcgtccctgagagtcattattttccttttaacattgacatcatacactttgacctaaattaggaattaaaacactatcagagcaatcgttaaaattttataaggtaaacttcagttctttcttcggaggatcagaaatactcatgtagcctccatctaaggaatccaaggtgcaggaagcggaatgacgtaccagacatgacacagcaataagtggaagggttttgatgaggatcagtgcttctctgagtaaggtgaggctgaagaattgaggagtctctgccagccccaattaactcacttctttgaattctactgatggagattgttctgggaatatctgagataaaatttatctttgcaataactgttatttttaaggaaaatttcatgaacgaactaacagcaagtacaagattttggagactaacataatgggtgattattatggctacttaagctaacaaacttttaagatagaacaactattttgcatataaatattaaatcaagtgttttccattcaattcctaatgaggaagctttcctactggccatagcggatacctaacatcacttactagctgtttctttgttactgaacatggcaggagggggcatgggggggtgtcatgggactgcctactttcagaaagttcagctttttgtatttcatataacagcaaaagtttacaggacttggaagttcatatagtatttatattgtgccaagtagagctcttaacaagcaattactgtatacaaacaccttcattaaaaaaatgagaattttagatgacagtcatgtgtatcatttcttaaagataacctacaaggagtcaaaggagtttctctgtttggccaacacagaacagctgatgaataaatatattcataaggagaaactggctgaaaaataaaataccagtgctttgtaaaagcaatgatggaggtgagcaaatcctaatcttaaatgagacataaaaaggaccgcacgtcaattcaattgtttaattagagataattctcagaagaaaaggggttaattttttcaaaataaatgattcaatttatgataagccctagaggctttatgctaattacaagttattttaagacttgcggttgtaagcacagtttatggttacctctgtgagagctgtttggatcatgagagctctactttatgccttgttttagctgcttgaaatgagattttgttgttgtgcaggaacactaatataaaaagcagaatttgtgtgttttgttggtacgcatagatcataactgtgggccatgaggaatgtgcagctgttctttcattgcactaggaaggaaaatgttttgctgtgttacaagtctgtgtgcttataccttcctgacttgctcctttcagaataatttccccagagtcaaatcccaggcaagtgcagcctttacatattgagatgggcataaatgctagctcgaggctttttctgaagttgtgaaaggttgacagtactttactggttggctcaagtaagaaattatggaggttttcatgtcagaacagctgcacttacattttccatccaaaacacttaccaatttactcaaaattaggagataattgaaaagcagtttcataacattctggctttctaaaagaaaataaaattgttttaaaacatgcaaattatattgttaattgctgagtgtttttttctctcatagtagcggttgtgcattctgtctatgcctgcttggatatttatgttgagtaactacatttgttttgttttcagttataaaatgttcttttacttgagtaagagcaaattcttcccttatttatttttccagagatgtcatgctcattatgtatgcatttgggtgtaactacaacaaaacaaaatggattttcataaataaaatttacatagctgaaaagagcacattttatctccaagataagcattgccatcttttttctgattgttgctctgtaattcttctgaacaacaaaatgaaaataagtcaaaatgagaaatcaattctgtctctttataaaatgtcaaatatgtatgtcaaattccctaagaactgtaaatggctcttagtatttttaaaaatcctagatgtaattacattaagtaatttggtttccaaaggagtttgaataattaaaaagcacttgctgattttcttcagtagactaaaaagtattttaataatgcacaaatagcagaaattgaaaaaagacttaaatagaaggatcattttaactaaccaatttatgaattttgaaatttcaagcttatggtgtttataccaagacatgctacctattagttacaggcagatgacattagtgagaaatcagttatatgttaggcttttaaaatttaactcaattctaaaagctttcctctctctttacatggctgttccataaccatatgggagacatgaactccagttgactctggattacctacggaattggggtgagggttagtatggataaatgaaatccacagataatcttaagacattttagctttcatctccccaatctcccctgcctccaaattatttcagccgctgagatgcagcaaaatgtaatatgtccttgttttatttttttctcttatgtttcctagttttctcgattactttaacagaagtttagggaaaactgagtggtccgtgtgtaggcatgaggcaaaaggcattgaatttagatcctcatccttaaataggcatgactgtatgagccatgctgttttcttgcaaaccattttttttcttgcccctgacaaattgtaacctgctttctctggtgaaagcagttctgacccttttccatccctaataactgcttggaacctgactaagataaagggtcctgctgctgcagacgccagcttacagggcacaatcagggctagcattgattggcaatggttcattacccatggggacagctgccctgtttatcatcctaatcttttttggacccaatgttttttgttttttcacccactctgtggtagagctgaggctggaggaggctgtgcttgggttcatcttaccagctggaaagaatgaaaacgtgaccaaacacctgaaaaattgccacctggccacacaatgactttaatgagactggctctcatctccttctgggactgcaatcacaacaagacaatgtttgttagtttttaatgcaataatcagttcttttgaaggaaagcactctatgtagggttaggggtggctgggtggctaaaaacaaactgtgttttttaaaaaaaacatcaactgctgctaaaaaccaatgtgttcattgttttttaaagtcaggactatcatgtaagtagacattgcttttatttcttttgaaaaagaagaggctgattcaaatcaagaatctctcagtttatttctttgtaataatttatacatttataaattcaatcatttctgtattcttcctgtgaagaattattataatttatctggctctagagaaaaataaggacttgggtatccaagatttaaaccttcagtatctaaacaccaggaggtgctctaagataacatgaaacaacacatttccccgagatttacggattctagttacatgaaatttactgacaaaactgtttgctctgagaggccctaaacgttcagattctaaggtatgcagtgtagtagaccatcttctggatctaaaggactctttcaagggagaacagtagccctgtcaagatttcggggacattagtaaaaatttgcagagagatgttttctacatgcctatgacctggaactatctgtggaagatggtaaacaaagaatgttaatactragtttgttttgtgttacacagtttaaaatgcggtgagaaagccaggtgagactatgaaattttggagctggtgtattacattgtgcatggataagtactgtatttgctcttccaaaccagagatcaggtgaaattatgaagacaaccttttcaggtattatatagggagaaattaaagagaaatttatttgtgtttttatggataatcaataggatcctatcctggggaaagcattctaataagtaatttaaaaaaataagcttcattgagttacaatttacatacaagaaaattaatacaatgaattttacagttagaaatgcataatttgatgaattttggcagatgtggatagtcatgtaagtaccacaaaagtcatgatatagaacatttctatcatccaaaaagagttctttcatgttccacrtcaattaatgtcattgctccacaccttggaccctggtaactaatgatttgttttctattgctataattttgccttttctggaattttatattcatttttttttgtggccagctttttaaacttttcatactgcttttgagattcacctatgttgtatgtattaatagctgatttctttttatgacagagtagtattccattgtatggatgcattgtaatgttattatacattcacaacttgatgaatattgagtttttttccaattttttggtattatgaataaagctgcaatgaagatctgcatgcaagtctttgtatagacaagtgcttttccttttctcttgggaaaatacttgggaatgggatggctagaacatatagtgggtatatttttaactttttcaagatactcttataatatttttcagagcatttgtactgtcttacattaccgccagtagattataaaacttccaaattctctgcacctcaccaacacttggtatggtcagtctttttaattttagccattcatagtggttgtaacttgcatttacctaaagatacactgagaatcttttgtatgtgtttgttttacatgcatacattttctttaaaggagtttcattcaaatattttgccaaattttaattgggctgtgttttcatattattgaaatttggggattctttatatatcagagtacaaatgctttatccaatgtaggctttgcaaatattttcttctagttcatggcttgtcttctaattcattcttttcaaacaacaaaagtttttagttttgatgacatcttctttatcattgtctttaatggatcatgctttctgtgttgttgctaagaaatcttggcctgatccaaggttacataggttttctccaaagttttgatctaaaggttttataatttcagtttttactttaagcctgttatttgtgttaatgttatatatggtgtaagataggattaaaactcatttttttcatattaatttcaaatgttttcagcatcacttgttaaaaaagattatagtttcctcactgaattgcttttgcacatttgtaaaaaaaccagttgtccatatgtgtgtgcatttatttctggacactgcagttaatctaatgacctatttctcccatccaaatattagctaggcctgactctgcttagcttctgagatcacatgagagcaagtacatttagggtggtatggttggagactattgacctatttctttatctttataccagtaccactctgtcttaattcctgtagcctgggccaactacataatttttgggatctagtataaaataaaaatatgggttcctttgttaaaagttaagaatgtcaagacagagacaaagagcattcaaccaagcacagagctcttctgacagtgggaccttgtgcaactacacaggctacatgcccatgaagccagccctgatcacagcattataatatgtcttgaaataaaaatcaggcagagttagcatttccactttattcttccttttcaaagttacgttgactagtccaggatttttgtatttccatatgaattttagagctagtctattttttttttaaaacaaaccagtggaatttttattaggattgcagtaaatgtatagatcaacttgagggggatagatttctttgcaatattgtgtcatcagaccaatttagggctatgtgagttatttatcttttttattattattaagttgtagggtacatgtgcacaccgtgcaggtttgttacatatgtatacatgtgccattttggtgtgctgcacacattaactcatcatttacattaggtatatctcctaatgctatccctccccgctccccccaccccatgacaggccccggtgtgtgaagttccccttcctgtgtcaaagtgttctcattgttcaattcccacctatgagtgagaacatgtggtgtttggttttttgtccttgtgatagtttgctgagaatgatggtttccagcttcatccatgtccctacaaaggacatgaactcatccttttttatggctgcatagtattccatggtatatatgtgccacattttcttaatccagtctatctttaatgaacatttgggttggttccaagtctttgctattgtgaatagtgccacaatgaacatatttatcttttttgagtgagttttgtagttggtgtctattgaggaactgggccatgtcatcaatgttgtcaaatttcttggcataaagttgtgtccttccttattcttttttcatatatgtagcatctctgttaatagcacatctgtcattactgatattggtgatttgtatcttctcttttcttgatgaatttgactagagttttattaatgttattgattttctcatagaatcatttttggtttcatgatttttaaaatttaattgatttctgctcttatttcctacttactttttacttaattttctcttcttttcttagtttcctaaagtggaaactttcagatttgaaccctttcttattttctaatatggatgtttagtgttacagtttctccactagttattgtgttagtggcatctacaaatattgatgtattatgtctgtatttatatttcattaaaacggtttctaatttttaaatttcttctttaatctatgggttatttagaagttgttatttagtctctaaatatttcaggattttccaaaggtttttcccttatttatttctaatttaattctattgtggtcagaaaacatttgtataacttaaattcttttcatcttatggggatttgttttatcacgaagactctggtttattttggtaaatattccatatacatttgagaagaatgtacattctgctgttcttgtgtggagtgttttatcaattccatcttgggcaagctggttaatgtaggtcaatgttgtcgaaaacttttatgtcttcactgatataccagctacttttcaacccacttttgagagaagggtactgaaatatccaactgtaattatgggtttgtctgctccttataattctatcagttttttccttatatattttgaagttgtgttgttaaatgcaaaaactttagaattgttatgtctcctgatatatgttgaattcattaacaatatgtgatgacttcctctattgtcaataatattcttggctctaaaatataccttgtcttatattcattctggtttttctttgatttgtattagaatggtatatattttttccatcactttacttttaacctgcacacaagcatttaaaatgtgtttcctgtgggctgcatatagttgtgccttgtttttaaatccaatttgacttagacactattttcatctagaaataaatttgacaatttattttaattgaggatgtttagaccatttacatttaatgtgattattgatacagttaagtttcagtcttttttcttgtcatttgttttctggtcctctgtactttgtttaccctttgcaaatttcctgtcttctttgggatttaacatttcttatgattttatttcattttctttgcaagtttactagctcttactttttgtttgttttattgttttagtggttgctttagagtttattttatacatattcaagttatcacagtctaccttcaagtggtattatatcacttaatgtgtagtacaagaaccttacaatagtattatttctatttctttccttttattctttatattattgatgtcatgtattttattatacatatgttataggtattataattcattgttattatttttgtctaaatagtaaattatcttttttttttttaattttgagacagagtctcactgtgttgcccaggctggggtgcagtgacacgatcttggctcactacacacctggcctcccaggttcagacgattcttgtgcctcagcctctccagtagctgggattataggcatacaccaccacacctggttaatttttatatttttattagagatggggttttgccgtgttggccaggctggtctcaaactcctggtttcaagtgatctgcctgctttggcctcccaaagtgctgcaattacaggcgtcactgcgcctggccagtcgattatcttttaaatatatttaaatgaggaaaatatctcatacatttacccagacagttaccatttcaaatgttctttctttaaaatagattcatatttccatctggcattattttccttttgcctaaaggacttcctttaatttaaggaatgtttaaatatgtttaacatatctgtactgtgggtttgctggtgataaattttctgtgtttttgtgtgtctaaaaaaatcattatttgtctttatttttaaaatttattttttctgtgtatagaattctaggttggcaatttgatgtttattcattcagtactttaccagcacttcactgacattatttactataagaaatttgctattattattatctttgttcctatttatgtatcatgctattttattctgatgtgttaagattttctctttattattagttttcataaatttaattatgatgtgccttcgtgtagttttcttcatgttttttgtccttatagccactgagcttcttgaatctgtggaattataattttcattaagttcagaaaaattttagcctttttttttgtatcgtgccctttttctttacccttttggagaattcaattacctatatatgagctatttgaagttgtcccacaggataatactattctttttattcatttctttctctatgtctttcattttagatagtttctactgtgatgtatttaagttcattaatcttttcttctgcactgtcaaatttgttgtgaatcccaatgaatattgattttatcttagacactattttcatctagaaattttattggtattatttttatatcttccatagctttgactgttagtatagttgatagagttatattatctgttttaatgtttttgtctgttaattctaacatctgggtgagtttgggtctgattttgatttttcttatcatcatggctcatattttcctgcctctttgcatgactggccatctttgactggatgcttgaaattgtaattttatattactgggtgctagatatttttatatttctatcaatatttttgagctttgtttttggattcaggtaagtcgcttagaaacagatctttttgcatcttgcttttcagatgtgtaatgcaggagcagtacagcagtttagtctagagttacttatttctgaccaatgaggcaaagtccttctgtgaactctacttaatgcccctgaattatgagattttcaagtcaggctggtgccaacaagaaatattccaagaactgtgtacatgccagatttccgctaattgttttgaatggctttctggactcagatggtttcctcacatgcatgtactgatcagtactcaagggagactctctgcagacctctgggatctctttctgctcaacattttcttctccagaactcttccctgcaaaatctagctaccttaagcatccttagatttttagttccacttctactcagggagtccactgggctttgcatgggttgtccctctctgttctgtggtctggaaattcttttgaggcaatatatctggaacaatcgtatggcttacttagtcggtttcttgtttctttcgcattgctgtccttcattgcctgatgttcagtgtcttgaaagccattgtaacgtatattcttgtctgttttcttttgtttcttgttatttcagctgggaggttaaatctggccccttcttaactagaaatagaagcaattcccatactctttttaattttttgatattatttatcagactttgggtttgtttagatatctgtctattttctctctcactggagatcaggtactctgttgtgttcacattttttgaacattagtgaatgaataaatgaatgaagtatatgatctaaaatgacaatgaacatagaaatcttgaaactttctgtaatcacctaccaagttatcttgccttataattgttttatgttgataatcagtggctcttttctaaagaatttgcaacattttattgataattgcccactgtttctagtggtaagaaaagagtcctttctcctcagtttgcagaagaaaaagtagagcatttaaaacttttttagagtgtcaagcaaaggttgtttgcattataaaatcaatgaaaatactgaagcttttcatctctgaaaaatattgaatatgtaaattagggcacaaattttagtttgctcttaggtagtttgatgataattatgagagttatattatttaaatctaagctcttgagagttctttcttttttatatttctaagagagcccaaccttatgttaatgtacaaattctttttgagtattagtgaatcaatagttttcacaaattatctaactcctcattatcctcactttccagtatgagaaatctcatttaatttaagataagataatatctgttactgtaataattcagttctgacaaattttaattttattttaaaatactggcagaaggtaaaatctcaaatatgaaattctccttttgactttatctatctatttatcttttggaactcatggttttccacttgcttttttccattaacatatcttgaagattttttctctattagcttttataattttacctttttcttttaattgctgcagaatatttctcatgtacatgtattataatttacataatcaatcttccattgaagttttaaatggaattctttgtgcaactaagaatattactatcaaccacacctttttatgtttgatatgaaacatctgtgaaccttttaggatttgtatttaatttaatgaattttctggaatttttggaccattccattggggacatttagataatttctggccaagataaagtgtgactgctttgaaaagtctacaaaagcaacctttacaaaagcttctcttggcaaagcacagcctagaaccaagccaatagcatttttcagcttcactgcattcatggcttttgaggccatgaggtgtcagtatcctttctgtagatgtttcagaagaatgcctcaattcatatttcacttgtgggattttgtagtttggcataaatgaacactacaaataggttctagtttggtgaccatatattacaaaaatggttggattcatatttatgtatattcgtgaatttcaggttttttgaaattgatatccagcctgtgaaatcaggtgtaatgttttcaaaagtaaaatttagtattactaacacgtttcaaatactattttataatacacttgtttattagtctgttctcatattgctatataggactgcctgagactgggcaatttataaagtaaaaaggtttaattgactaataattccacatggctagggaggcctcagaaaacttacagttatggcagaatgggaagaaaacacatccttcttcacatgatgacaggaaagagaagaatgagagccaagcgaaggggaaagccccttacaaaaccatcagatcttgtgaaagcttcctatcatgagaatagcatggggaaaaacacacccatgattaaattacctccacctggtccctcccatgacatgtggggattatggaaaccacaattcaagataagatttgggtggaggcaaaaacaaatcatatcattccatccctggcccctcccaaatctcatgtcctcacaattcaaaacacaatcatgcctttccaatagtcccccaaagtgttaacaaattccagcataactcaaaagccaagtccaaagtctcatctgagacaaggtaagttccttctacctatgaacctgtaaaatcaaatgcaagttagttacttcctagattcaatgagggtacaggcattgggtaaatatacccattccaaatgggagaagttggtcaaaacaaaggggctgcaggccccaataggacagtcattaaatcttaaatttccaaaatcatctcctttgactccatgtctcacatccagggcactctgatgcaagaggtggtggccttgggcagctccacccctgtggctttgcagggtacagcccccttcctggctgctttcatgggctggccttgagcgtggcattgccaggtgcatggtccaagctgtcagtggcagtaccattctggggtttggaggatggtggccctcctctcacatctccactaggcagtgccccagtgggactctgtgtgtggactctgactccacatttctcttccacactgctctagcagaggttcttcatgaaggctccacccctgcagcaaacttctgcctggacatccaggcatttacatatatcctctgaaatcaagatggaggttttccaacctcaattcttgacttctttgcactagcaggctcaacaccacatggaagctgtcaaagcttggggcttgtaccctccgaagccaaaacctgagctgtaccttgaccccttttagttactgctggagtggctgggatgcagcgcaccaagtcaataggctgcacacagcaggggggtcctggacctgctatcaggaagccattttttcctcctaggccttcaggcctgtgatgggaggggccaccgtaaaggtctctgacatgccctggagacatattctccattgtcttggtgattaatatgtagcttcttgttacttatgtaaacttctgcagcaggcttgaatttctccccagaagatggggtttccttttctattgcatcatcaggctgcaaattttccaaacttttatgctctgcttcttcttgaatgctttgctgcttagaaatttcttccacaagataccctaaatcatctctctcaagttcaaagctccacagatctctagggcaggggcaaaatgccaccagtgtctttgctaaagcataacaagagtcactgttactccagttcccgacaaattcctcatctcagtctgaaaccatctcagcatgaacttcattgcccttattactatcagcattttggtcaaagccattcaatacatgtctaggaagttccaaactttcccacatctttctgtcttctgagccctccaagtctctaggaagttccaaactttcccacattttcctgtcttctgagccctccaaagtgttctaaactctgcctgttacccagttccgaactcactcccacatttttgggtatacttatagcactccactcctggtaccaatttactgtattagtccattctcacactgctataaagtactgactgagatggtaatttataaaggctaaagatctaatttaatcacagttcagcatggctggagaggcctcaggaaacttacaatcatggtggaaggggaagcaaacatgtctttcttgacatgatggcagaaaggagaagaatgagagctgagccaaggaggaaggccattagaaaaccatcagatatcatgagaacttattcactatcatgagaatgccatgtggggaaccacccccatgattcaattacctccacctggtccctaccgtgacatatgggcattatggaaactacaattcaagatgagatttgggtggggacacagccacaccatataagcttgatcaaataaacttttttcaaaaaaaaaaagaagaacagaagatcattttgaaaataacaaaaatgtgccacacatttaatactttttcttctaaaagctttagatgcttccttagatatcatcaaattatatgtcactgcagtcctggaagaaagatcagtgataggaattgtaggcatttatgggcttcatggttttgtccaagataaaaagaggaacccctatttattgctcacatcctttagaaaagtaacttaccatacattgtctcttgttagcctcagaacatcaacgtaagggaggtattattagccctgaggttcaatgacattaagagtttaaacaaagccatacacctagaaagtgaaagtgagggtttgaactcaggtctttcttttttcaaatcttgtgctttttcctccaaaaggaatattttttttccactatagaatacattttttgtgtatgtgcacatgcatacatgtgtgtatggagagttgctccagaattctcatacatttctatatcctaatgtaaagggaaaaaaaatccacatagcctatatttgttttgaacaggaaagaaaataatttttttttttttgagacggtgtcttgctctgtcacccaggctggagtgcagtggcacgatctcagctcactgcaagctccacctcctgggttcatgccattttcctgcctcagcctcccgagtagctgggactgcaggcgcccaccaccacgactggctaatttttttgtatttttagtagagagagggtttcaccatgttagccaggatgatctcaatctcctgacttcgtgatccgcccgcctcagcctcccaaagtgctgggattacaggtgtgagcctccgtgcccagcaagaaaataaattgataggagatggagtccttactaagaatttgattttttgacagtttaaagaaaaacacatttttaaaaatatatattccttctttgattttcactggaattagaaaaaggagaataatgttctcatgagagaagtgtcctagcataataaaagcaaagcctaagaatgaattgtttagtaagagatttcctgtggctaggactggaggcaaatttttttgaacagtactgtctgacatatattcaaagttgtttactattctatgtgatcattatcctctttgtctttaaatcttcaaattggttacatataatatccttgtgtttgttttaatttgggtaatgagggagaagatgatggccatggtgggcaaaataagaaagggcttagcagtacagaaggctaaccatgaacagcaatcaaggattaagcaggggcagcaacttaaagggggagggagaggagatttcacttctcttccagatttccattctgttcttctcagagaatctgcagcaatattagaacactagacttctcatagtaagtggaatggggactaaaacctaaaagacttgggaattctggggaggagggtggaagacttggggatatttgatttaaataactttcataatcattaggctttcttgttttaccattttgggtagctataagatacctcacaaaaatattcctgtagttaccttcagtatctctgaagtgataacttattaataaaattatcattagtgccctcatgagacatagaaaatgcttggttgcattctctcttcctttatttcctctttctttttgcatatttggggggtatgtgtctatctgccgatgggcagaattttttaaatatagcaagtggcttcctaacaaggtgtttaaaattcataatgaacatgttataggttttagaaacaacctcattgttaataagactgagaacttgaggcacaaagagagtaactcgtttcagcagaatgtggaatataggcacaatagcatgaggtaaaacaagctgtagtatttgctagattatataggcagtcaataccattgccttcatgtaatttaattcttagttttgattttctgttgaagtaattgatggaagatcaacataaattaaataatattttcattttttcttaaagacaagtaatacaactctgttttgagaaaatactatttaaaatatctatttttaatgtaatgattcagttatctatttctttgagttttcctaaattaagttttgctgttaaaaaaccttaactagataagcatctgttccttttgcatggttggagtctaccctcttcctaagaataaactcatttcagttatttttctttaataaagcctgctctaagactgccatttatgattctcaatttgagtggccttttctcaatgcctgcaatttaagtacataatattttctattgtttttcctgcttactctagtaaattactgccattgtctcctgatctacctactgtttcaaatctaaattgacaatacaaaacaatttgaatatttggaacaatatttatcctctaacataggtcagatattaataaattcttacagaatccccattaagagaggtggctgtgtcatggctaagagcatggacttttaaatgaaatgcctggattttaatccaggcttcaccacttacaattctgtgaaactggacaaattttaaaatctctctttaaatggttaccacatctggaaaatctcaatgaaatagcatatttcctatctggttgttgcaagaaaaaaatatatatatatatatgtgccaaattacagcaaaatctatcccatggtatttcatgtattttacattaaaaaagtacactaagaagcaaattcatttaatagtcaaaataccaattaaaataatctctaatgcagtggtatgttgatttaaatcatccttaatgttatctgcagtatctcagttgttagaggagattatttaatccatgaataataatatattattgaaagcacaagtatattggcatctgtcttagtcagtcctggctgctgtaacagaataccatagactgggtagcttaaacaacatttattcctgagttttggaggctgggaagtccaagttcagagcaccagcagatctctaactcttggtgcacatcagtaacccaagtctcctctccttgagtgtggatggaaactgtgatttgtttcttaaccaatagaatatggcaaaggtgataggatgtatgtgattatgtgcatgtgattatataagattgtaatgcgtgtcttgtgaaaagcctttcttttttgttggctttgtagaggaaagctgctgtgctgtaagaagtccacagggcaagaaacttaggccctcggtctggcaacccacaagatactgaatattcctagtagttacatgggcaaagaagtggaactttctcctctcaagctttagagaaactactaggctgacaccttggttgtagccttgcagaatactcagttaagctgtgctcacactcctgactcacagaacctgtgagacagtaaaagcatttttatggtactaagtttgtggtaataggtaggtaattaacacagaatctttgctctgtagtggcagaaagcttagcaaaattgtctcctacaatttatatggaaagaagaatttgtaaatatcatgcacatagttatctagctaaggagatttttgaggaaagtattgaatattctgcctaatttcttcttgctgcttacggtaagatgcaagaggagaggtataaattgacagaactgttaaacaaaaacaaacaagggctggatgacttaggaaatgctcggcctctccagagacaaaaaaccccatgacatttgagaaatgactccagtccctgccacaaatgaaggtctaaagaaaaacatgggggtgtgattgtacaaccttttgttaaaaacctcggaaaaatcaaaggactagagtagtcttcagttacataaactgccctttcaagagattgaaattgtgcctcatggaactttttgattaaatgatagtatctctaagaagttaagtgtattgtccttttgtctaatggagtgaacctcagtgaaattcacaggagtcctacgaagtatttgagaaaattgttacagcaaaagcaatgttaactggaactgaaagtggcagagaataaaatgtgaaagaggcttctggaccctcaaattttaggcaggagcaggctgttaaaattactcagctgcaaacatgtactttctctctctctcacacacacacacacacacacacacacacacacacacacacacacacacgaaggatgattcagagggcaaagctgagagccatgaagaattatcctatgctgagaaacctagttaagaacatttttaaatttgccaggctggatttcagaattgctatggaccagtgacgactttgtaccttctatttcccccattttgaacaagaatgtctgtatgtctatagatgttttcttatgcctgttcaaccactatatgttgggtgtgtgggtgggcaaataacttgtctttttagtttgacagattgacagatcaatttaaacagccttcatcaatgcctggacctgatttagataatacaattctggatattgtgcagatgctataacagggtggaactctgggggaccttggggagaggatgagtgtattttgcacgtgagaagaatgattcacattcttctcacgtgcaaaatacactcatcctctcccaaggggggccagagggtgaactgtggcagacagaatgtagggtgcctccatggtctccacctcccacatatttatgcctttatgcagccacttttccttagtgtgagtgggatccatggctcacttctaaccaatgtcaaaagagatgtatgtatgtaattacatgaatgtgatttagtcacatatgattgcaattgtatcttgcaaggtgactctctttttcccttgctggctttgaagaagcaagctaccatgttataagatacacatgaagagggtcccatggcaagaaactgagagcagcctctggccaatagccaataaggaaccaagatcctcagtccagtagcctacaagaaactgaatgctgccaacaatcacaggagtgaggaagcagatcctttcctaattgagccttagagaggaaaccctggcctataccttgattgttaccttgcagaagagccagctaagctgtgcctagactcctaacctatataaactgtgaaataataaccatgtgtttttgtaaggtaccaactttggggtaacattgttgcacaagcagtcaacaatgaatacatagaatttactaaaatgtaagtttcatgattgcaaataattttgcacatacctagaaatgggtctggaatttggaggtgttcagtaaatattggtaggaaataaagaagtcagaaagaaagggaggaagcacaggacagccactgagacatcagtgtggtcttgcgagcagactattgatgtgtcatgtgatttgctggtacaaagtaagtttggtaggatgtgctggaaaagtttttttctacatgattttgtatctgtgtcaaatgaatatggttatttacatattgagttgagggatttacatgtaggtgtttggttaggaggaagaaatgacatggatgtcaagtttacaatttctcagtactaccctattccctaatattgtgataagaactagttatagcagtccaatctcaagaaatagctccactacttctcacttctgagaatatatcatgattatatattataaatatataattatatgtattgcatatattatatgtaattataatatgtattattgcatatataatacgtaatataacatataatatataattatatataatacatatataattataatgtattttattctcagaggtgataagtggttattatataagaggtggttatataatatataattacatataatatatagtatataatatatatactgtatatacatatataatacctgtcaagtaaatggaatcatacagtgtgtgatcttttgcatattgctttttcacttagcataatactgctgaggttcattcctattgtactgtgtatcagcaacttcctttttactgctgaataatgtgctgttgtatggttgtgtcacattttgtttaacaattcaccagtcgatgaacatttgaattgtttcaactttttgtttaatgaaaacaatgctgccataaatatgactcatatcacatgaaagtctttgtatggatatatattttcatttctcttgggtaaatttctaggtgtaaaattgctgggttatatgatacatttaagttaacttttgtcatgctatcttcaggacaagatttagaaaaacaaaaccttgtagtgcttaacaatgctctttataaataatatttcttaaagctcttttgacttgatttgcatgtttgaaaaaaaggtggagtatgggctgcttattttatataacaaggaatattaaatgtataaaaaagcacacctttaagtggaaaggatatgtagtactctagtcaactactgatagaaagtatacatacagagagagattaggtattactttagaaccccaatattacccaaaatgattcacttataggaatacttgaacctatattaaatgaaggtaattaaaaaaaattagatgcatggatctaattatcacacattttgaggaaggaaatataagaagccatttcatatacttatttatataacatctctcaagtgcagaaacataaagctaattagtgtaaattaatgtacaaatagagaattcatagcaaataaaatgagaaactatgctcagaaaagattgcttctattgtaatgaactgcaaatgccttagcattttcattggcttggtaaaaagttcattgatctgaataaggggaatcatgagtgtaactgtaactgtttttttttttttttttccagaaacaagcgtcactacaggctttataagattaataaagttttctaggaattaagtacaaaatatccagaacagctttcaactcgtatgttatgtgtatgattcttcttctcactttaatgttaatttacttatttgtggaattctagcacaaaaaggcacttagtgaagattaaaagtgtagtctttggaataaatataaaaggaaaataacatcgatttagtttgtcttcctcataggctgcaagagattaaaaaatgtaacatgatttaagaaggaaaggcataaattaatgaacaatagatgatgggtctgaagaaaggtatataagatggttgtatacgttcctaagtgttttggtttgtttatatggagggcatcaatattatccctggagacttcttctaggtaccattgtcaaagagagaataatcagctacagaggccatgggtgcaacacggtgtggtatttcttctgttctaagctctaggtatgaaaggctgggctattcaagagaccaatactaagtgcataacaattctttacaataccaagctttttaaaaagtcaccattttttttttggtgtccagatgtcatacatacattttgcaatggtaggaaacttaaaaaaaaattatgtgtacacataaaagattgcgtgagtgtgtctacactaggactaaaatttggggaatttgtaagtcaacttcagcatgggaaaattaactggcaactgggtaactaatgctttttgagtgactaccatgtgctaggcactgttgtaattgctgtatacatgttaacacatttaatcttcttaacagtcctatgatgtgggtataattagggtcatttccatttattggatgaggaaccgtgaggcactgggagttaggtaaatggcccaaaattacacagcttggaagtgctgaggtcaatatttgaactcagacaatctggccccagatcttacattctaaactaatatgccatatcattctctttactgattacactgagtaacttctttgtagaaagtaagatatacttatctgagtattgccctgttatcccaaaatacatactacaataaaaatccttcatatttaccgtatactaattgaatatttgtaatcatttgaaaaaatgtaatacatttccatgctgttaataattatgttgagaagaaactattttgtaacttttttgaaaacggaaagtacttttctgtttaatatcttttaaatggaaaatactttctatggtcgtgattataaactttcctttggttttaattctgtctcagggtttgttggtggtgaacttgcctgattgaaagtcttgggcaagtttgggatattctcactctgacttaagacttcgcaatgcatttgaactcctctgtcctgggcaatgtcaggattggttcaaataattattcataagacataaaatgtaatgagaagaaacattataggcaaatagtcttttagaaccttgttttaaattaaaacatggttttaatttacttgggcattttaactaatgcttaggcattttaaatgcaaaattgatagcatcattaaccaaatgaaaaatcataatatatgtctttcagataaccaaaaagaggtggaaaagtctagcaattgataccacaaagatactgaactgtggtttagccaagtagagggcatagctcctgggagtggaacaagttgcttctgaagtatgagtttataaacctcaaaacaagactagtgacaaattttgcttcaatacgtctaagttaatatataaaataagatttctggtggagaggtttatagatttttcagtaaacaaattgtttttaaacacctttaagctggagaagaagcaactgcctacctgtaagtaattggtatgctaactataggtaattcttttctaggcatcagccaaacctcataaaaaacactactgtggtagttatttcattggtttgaattgtctcaggcacttgcaattttttcaaagattatatttctctgaaaatatcctataacttaacattttcactcttctggctgttctttgcctggttacttcaaggggtttctctcaagtactaccgtaacttacaggatggatgttttcttattcctatctgcaattctgtgaaaataaagcaattgttcagtgggtagtaatatgaatgcaaaaatatgtctccacagaagcattagcataatttactgtacattcaatgaaattaagacagccaataaggaatataattcttatttattttgaaatgatggtaacaaatggctttgttaccttcaagcttcttactggcttaagctcttttaaaattctatggactatataagctactcaattttaagttttcatttttgaattcaagcttttttggttaggtaaagaatagaagtaactaccataaagaagaaaatataatcatctaatttctcctgaactctgtataacattggccattaatctacatcaatatatggtgaagatatgtaagcagaatgtacaatgtataagacatgcatatatcaatataaggtagtaatgtttattttaaattccgcagatccatttagattcctttggttttatatttggtctattttgttactgcctctataattctgcttatttatttcaaattttacaacatctatttctcctttgagaaaacgtagacaactgatattgggatagagtttaaattgtgagaaatattcagttacagtaaaagaaatgcattagaactagaacttgcgtgattttaaattttattagaagtaggtgtcaagttacctaagatgtccaagagacagctgatgggttatgagttaaattttgggttctgcttatcatttcttagaaatcaatttaaggcatcagttttcaatagcttttttatgtataactaaaaaagagatatatgatatttggtaaaataaagatacatggcttccagtctcttgagacatctgtcttcatgaaagagatggagagttcccatttctacttacaagaatgaatgtatgtcataataaagaccagctatcatttgttatatacaaaatatgtggttctttctttgactttttttctggatttagacaaccacagatgacatttatgagaaatgaactacactgaattcaactgagaaagtagaagattctgtatctccattaacttgtgagaggcttatcattccaaaccttctccagacagcccagcgatcttcacattctctcaactccgtggtctatgactgtcatttgtcaattaattgcaaactgagttcatatatagtctgtgtatgtttcagtacacatgtaggaatatctagggaggtattgttgttctgggctctttggaaatatactctgagaccctgagatttacatgaggaaagtttattgaggaatacttttgagaacttgagtgaggaaagcagggatgggcagagggagaagttgaactgtgatgcagttgcaacagaatccctaccaatcccacaggaagggggtctaactttgggtgaggcggcactttttgcctgagggtgattcccaaggaaagactaagctctgaaccactggcaaccaatgtttctgatagctgatgaaatgagagcctcagtctccaagagtgaaactccatctcaaaaaaaaaaaaaaaaaaaaaaaagaggaaacgagagcttcagcctcagtcctgaagctgggatctagcaggtacactacagcatccactacggtaggtaatgtaatgaaggttaatagcacagtccaacagacagatgcattggcttgaaacttgcttctatcatatactggttatgtaggcttgggcaagttacttaacctttctgtccctatgaagcggggataaagatactgcaggttatctcactgagttattgtgaaaatggatgagttaacacatgtaaagcttatagaagttcttggaatatggtgagagctcaacactcgtcagccattattattagaggctgctataaaataacaaaacttgttttcaaatgaacttacctgtatgaatatttgttcctgtttaggtcaggtgggctagtaacaaatacactccaaatctctagttgcttcaaacaacaaggatttatttcttggccatgccacatgtatatcatgtgttgactggtgttttcctcactttaggactcaacctgacagagcagccagtagctggaacattgcccctgctgtggtggagaaaaatatagcatttgaaatgcatgctgactcttaaaacttctacctggaaatgaaacatgccatttctactcgcatttcattggtcaaaataaatcatgtaggtacatataactctgagtgggaaggaaaatgtaatcctgccctcttcctggaaggaaaaccagaaatacttcaggaacagcactaagattatggcaatttaatttttaaaagttatctggggagatatatactcagttctgaaagctaactttttttgagcacttagtatcagccaggcactgtgacaaagagcaatattatgaaatagattctattgcagtaatatcccaatattgtacacttagaaaaaaaaagctgaggccgggtgtggtgtcatgcccgtaatcacagcactttggattgccgaggtgggtggatcacctgaggtaaggagtttgagaccagcctggccaacatggtgaaatgccatttctactaaaaatacaaaaattagctgggtgtagtggtttgcgcctataatcccagctacttgggaggttaatacacagtccaagagacagatgcattggcttgaaacttgcttctatcatatactggctatatacaggagaatcacttgaacccaggaggcagaggttgcagtgagccaagattgcgttactgcactccagctagggagacagcaagactgtctaaagaaaaaaaaaaactgacacttacagaaacttgatcaataccatatatctacaggatggtgaacacaggctcttattcaggcctatctgattgcaaagctcatactcataactaccactctacttccccccaagaacttcagtgatgccagcatgacttgaaattttttcaacacatgttctaagttttttcccaggaactgcttttagagtctatggtttagaggaatctaattccctaaatgtatgaactctcatatgtagtagaaacttctttcttgctcccatgatggtatcagatgggtagatagaccagtagagtggtcctcttccatggagtgggagactgatggacactccatcttcttcggcacaaggtattcaggggttatcttcttccatacagtcagaaggatgccagcgggccaggcctggaagtgatgcacataacttctgcttacattccattggcttgaaactcagtgatagtgctatacctgactataaggaaggctgggaaatgtagttaggctgtgtactaaatgtagacgcatgtactgtgctgtgtgttttcaaggtattgaatagaacttaaaattgggtaaatatacttgaggacggcagggaatctcttaaagtgacttcattgtttggcctgcaatcctctctcatttcagtattccagaatattgtcttattttagtttattccgctctctaacatttagtatcctgtacttcttaacatgttttatagtttggctttgtgctaatggaaagattatggttagaattctttacctttcctttaattttttttttagtatgaatacaggataatacagaggacactctgatagtaattagtaaagaaccctgcattctgaccccagaggagggcttcacatgctccttggccagcactgcatgctttaggggcccacaaggccaccagataactctgaagtctggtgggaaagcaacattttcggacttagcccccagagggctcctaacaaactatatgagtttttaaggagcttcacaggggatggagtggcagagtggattgttgaactggaagggaattttgaaagctattgcaatgaattgcaaaacttagcctttattaatgttttagaaactttcctttgcaggttgggttggagctgttttattgcctactcccataattaatcataaggttactaaaggttggattctatatcacaccatgattctagtgtggtcatcattactggaggcatgaggagtccagtaatgtatatcacttaaaaatttttaaatgctttcactaacactatatattttttcattttgttcactagggagactcagggtctattctccctctactttgtatttctagactaatctagggtttttatattttgttacatggaacatgtatgtataacgtctctaaaagttaataagacagatacctgcaaaattatttggtagaagaaaaacaggttcagctaggttgtattactttcctcaggtcatgtagttggtaataacacctcaaattttgaagcaagttcttctgacttttcattgttcttctccctaactatgttgcttatcatatttgttagaatgcaatctagaaaagtaaatattgactctttgaggatcaattccagttttgagaatagccgaaagttgcccagtattaaaagttggtgactaagttagataacattattttggataaataataaggtatgtttataaatatttttgaagctcattaaattgacaaataatatatatccttaaaatatttgttagcttcaattgacaaaaatgcacaaatttaaaaaaaatgcataagctgactatgtatccatgtgactatcaattattttaagatcggaaccagatctaaggaaactgaaaacagaaactagctgaaagaaaacatgcagagttcaaacaatggccatgtttaaaaactgaacttttcttttcagtgattttttaatgaagtctagtatgcagcactaagtgtgtgacttggcctttgagaggggttattcataaaggtggagggggaatgagcagttattcctatccattatgtgttaggtgatttatttcatttaatccttgtatctgtctatgaaacagataatacttctattttaatgatgagggaagggctcctggttttcagtacctgatcaaaggtcacacagctagaatcacacagccaccataggaggcagagcttgaattagaatcctagtccatctgttccaaagccaaggtctttcttccaaacaatgctgcttcttttcaaagggataagaaaggatggggatgaagtaggttgaatggtggtttcattcatgaatagttgttctgagggtcttagtcattacaataaataacaacaacaacaacaaaaattataaagattacaaaagaagtgaaagtgttccctgctatagactgttcccaaaggaaatatgcaagtctccaaatcatctacatgaactaacaaatacattcagtaagggcacaggaaacagagttaatataaaagaatcaactggttccttgtgtaacagcagcaacaagtgaaaagtgagatgatataaaatcctatttacaggagcaccaaaaatatgaaatatttatgaataaatttaaccaaaaaagttcaagatcactacattgaaaacaataaagcattgctgagagaaaaataaagagggccaaaaaaggttcgtggattagaacactcaatattgataagatgacaattctcccccagttggtcatagagtcagtatgatccgaataaaaatttcagcactcagttttgtagaaattgagaagtgattataaagtttatatgaaactacattaccaaggaaatttttaaaaataagaatggaattggaagacttaccttacttgattttaatacttacaacaaagttacagtaacaaagacagtatggttttggtgaaagcacacacatatagtttagatcagaacagagtccagaaatagagccacaggtacttggtcaatgaatttttgacaaaagtgctaaggtaatataatgggagaaataaaagtcttcaaaaaaaggtccaaggtcaactaaatacttgtgtggaaacaaaattaacatgtatccttacatcaccctacactcaaaaattaaattaaaatgaatcatagacttaaatgcaaaatctgagattgtaaatcttctagaagaaaatatagaaaaatatcttcacaaactagagataggggaaatattttggaagaaaaaagtgcatgaaacataaagaaaacaattgacaaattggatttcatcaaaataaaaaacatttgatttttaaagacaccactaataagatataaaatcaagccacagactgggagaaatgattcacaacacgtatatgaagaaagtaacttatatgtagcacaggcaaaaatacagtcatgactcattaataagacaaacactaaataaaaaaataggcaaaaggtatgaatagactyytccagaaaagatatatggatggcaaataagcacattaaaaagtcactagggaaatattaattatgatcmcaataaaatatctctatatacatacatattaaaatggctacaaatggtaaaaaatgaccattccaaatgttggcaaggatctggaggaaatagaactttcataaactagtttgattgtaaaattgtacaaccacattggaaaacacttttggcagtttctttaaaagttttatacataccctatggcccagtcattccacttctaggcatttactcaatggaaacaaaaacatatgttgacctaaagatagtatacacatgtttatagagttttacttataatatccccaagctgcaaacaacccaaatgtccatcagtggatgtatgaataaagaacttgtgatatatccatgcaatggaatactactcagcaataaaaagaaatgagctgttgatatgtggaacaacacgtacaagtatcaaaataattatgctgagtaaataaagccaggtaaaaccagggtacatattgcatgatttcattttaatattgttaaatgtaaatttatgtatagggatagaaagaggatgagtgattgctcggggaagagctgcgggaatgcatggcttatagataggcacaaagaaacttttaagagtgatggacatgttttctgtttttatcatgatgacatttgtatacatgtcaggttgcatgccttaaatacatacattttcaagtacttcaattatgccttaataaggttgaacaaattagcactagcagacaggtctatagattttccagctgtggagcaagtgagcatccattcttaaaccctaggttaaattccagattaagatggcataaatctaattttgtttactcctgataatcgaatctaaataaaggaattttttaaaagccacaaacctttaacaaacaagaatagggaaatgacaacaataaaattttgaacacttgaatcagattgaaaagtagtaaattacctgagaataccaaatcttcaactgggaatgagtaaagtcaagaatcaactcagctgatgttgcaaaaggctcaggaattatcagcactgactactcttggaagtgggaatgaaaggatgaaggtaaataagaactgtttgcaatctgatttagaagcattagatgcctagattccccctcacctgctctatgatcctatgcactgcccttctctgtccagacatagaactggaagtttattcctgggttgagtaaaacagagagtctctggactggggatgcctggcaaaattgagaatagcttatactgaaaataaggtgctcagagaatatgtgcacaatgaatgctgaggcttgtagcctacttccctcatggacttgagaaacaatagtaggcagacttttccttctgggcaggagattgaatactctatggaatctgaccagcccaagaggaaaacatctaaagaaactgacattgaaggttccagacgaacagcccacccagttctcttgactgtgaaactcttggtacaaaagctgcgcccttggacttatagcttccgtcaactttttagctccctttcctaaatatgagaagacaaccaagaattgctagatagctgatgaaattcctaaatgagatataacaactaaaaaagaaaaatccaatttggtggaaagaatacttttcaaaaactctcattaatatctccagaaacagaagaaaaaaattatatacttataaagaacaggatgcttcaaaatgaatattcaaaaaaaccttggaaatttaaataaagtagaaaaagaaataaaatgctcaaaaaaagacttgagagataaaggaatttcttcctgtgactactgcaaaaccagaactcaaagcaaaataaaacaaaaaacagaaatggaagctaagaaaaaataagaaaatcagaagaccagctcaaagtccaggagtttcagaaagacattccagagaagtgaaggggaggaattcattagcaaaaataatttaagattattctccaaaacagaaagatgtgattttctggaatgaaaggatgctgcaaagtcattaaaaattgatctactaccaaggctcatcatgatatttcagagtactggggataaagagaagatcacataagcttccaggggaggggaaaaccatgttatttaaaaggaaaataaattagaccagcttcagagttcataaaagtaacattgaaaactataaaacaatggagcaatatcttctacattcaaagggaaaataatttccaacctagaaatctatactcagccaaacagtcaataaaatccaaggaaagtctcaaaacgtttactcccatgtacccttccttgggaagctactgaggatacactttattaaaacaagttagtgaaccaagaaaaagggagagattggatcgaggaaacaggagatccaactcaggagacaagcaagctccctttgtttgatggtgaaaggaaatctttgaatgagaattatcagacataaaggggaatcactggagtgtaaatcaggttataatttcagagagagagatgtcttcaaaaacacaaagttgatagaatagttaaggtaaagaaatgtattgagaaggtatttagcgatatagggaagaacttgaagctgacttagggataagtacataaaaagttaagcaaataggggaaaaccagaaacaattgttagctccagggtaagtaggatattgagcagggaagaattttaatcataatttatattatggttcatttttgaattatatacatagatttgataaaatactgaataatcaaaattttgatttaactctatactaggaaggaatggggtatggggagtgaacatttacttggagagcaaaaagaactaaactcttaccttgtgtagttaatacataacacctaaaactgaaaagaaatctagaaatagcagtatgatcatgtttttggggtaaataccaagactcagctaagagttgaaactgattactttgtggaaggagaaatggaaaatgggggtgtcttgagattcctgtttgtattaacaagtcatagaagtagcttactcttgaactatgtgcatgtatcactttgataagaaacaaacatttaaaaaaaattgtcctcagttctagaattttcaacccctagaaatttctattcactctggtgtaaaccttgagaacctcccaaatatgtgatgagatcgtggatctcataagctctttgctctagggtagtttcaagcatggcttacatctgacatagccgacctcctggtgaatgatagacaagtgagaatatccaggtaatattcgcccttagaaacgtggagagtaactaaattttgttacgttggggatagagacaagaggagagtggttccaccatcagctagcttgttagcagaattttcatgtttgaagcagaaatattaacagaaaaaaaaatgcaccattaggtacgtgagtgatatggtctgaatgtatgtgtgcccccccaaattcatatgttaagacataacccccaaggtcatggtagtaaaaggtggggcctttggaagatgattaggtcatgatgctaaagctctcatgaatgtgattagtaactttataaaggggcttgaaggagcctgtttgcccctcctaccatgtgaggacccatggaaagttccatctttggagaagagaacaggccctcagcagacatcaaacctggtggcacctggatcttagatctcagacttcccagactccagaactgtgagaaataattttctgttatttaaaagttacccagtctaagatattttgttacagcggcctgaatggactaagatagtgggaaaagtaaagatgataagaacagctaagttcagagcagattcatttattggatcacaaaggaagatcttattcttgttttggacccataattaatttcaaggggaagtttgctgctttatataaaatgggaaattctgaaaatacttctagatgaggcactatggcaatattactcattcagaaaggttgaactttttaaggagctttttcttctttgattttatgttatttataaaggatttaaggtaccttttagtgtttcatgttctttgtttggaattctggacgtgatttcctgtggaaacacttgcaggtgtttgggtctacaatgccaaccctctaatgactcattcatctctggttgccacaacagcactgaactaatttttctatggaaaaattcaaatatgccttcatatagggcagtcaggaatacttgtgaccttattttgtaatggaaattaaaaaggactgatgataggtgggatcaggagtagagatgctctttaagggcaggagagtattactattgggaaaggtacagcttatagcagtgaagatttacaattcttcttccagtacctcttggcagaaaatactgtggtatccagaccccattctgaatctgatttgatttatttcttgggctagaagagaataaacatgtagttaggagcatttctaggcagtaataggttgaagagacaggtagagtggaatctcaagaggagagagggaaggaaggagatttcttcggtcacataatattctagttctggctcaagatattttatttacatatatatgtatatcttctgagttggatgcatgcacacatatgttgagctcgtataaatcaaaagctgtctgtacatcattttggtatcttgtcaacctcacaaaaactagtatcaatgaatgttatgaaatttcacaattcattagagaaaaatgaagtttaaatggtaagaatataaactcttaagttaatatgcttaataattaagaacttttgccttggagtagatgaagaaacccaagaattatatattaatttaacgaagagaaaaatatctatttaaagaattgaccattttctaaaattccagarcaacagtgcacataattggatgctcataacaacacagaaaaggatgctcagtctgtgaagttcagtctcaaccagttttgcattttatcttcatctttaatatcaggatagatattataacttaatgctttggtattttcctcaatatttcctttgggagactgaattttttcatagataaaagggaggtatacagatacgttcaatcctatttaccagaatgagtttttggctcatctttcatattgttttactgactgctatgaagaattgtcctcctcctcttttatttcatagaacatttctttttctttcttctctttttcttcttctcctttttctccttctcccctccccctccttctttttctccttctcctccttattctcctcctcctccccctcctacaacttcttttccttcctcctcctcttcttcttccccttccccttcctcctcctcctcctcctcctcttcttctttcttctgaaatggcgtcactcggttgcccaggctgcagtgccttagcacaatcatagctcactgcagcctcaagctcttaaggctcaagggatcctcccacctcagcctcctgagtagctgggaccacaggtgtgcaccactgtgtctggctcctattacacagaacattttacttggttttctcactgattttgtgatgttgtcctaattmcatagcgctggcacaaagattatataagcagtagggtactttgtggactcacgtgtggccaggtttgtcccaggatcttcaccctttcactcccttacttgtgactcaccccagcctatacagtgggaagaaattgaggtggagttgaagggattcatagaggtaatgaccccttggattgctggggagggctgtggcaacatcctccacccaccgccacctcaggtaaaggaagcagaggtgagaggaggctcttctaacacgtcctttaagccaaccaaggagttggctgcaaggatactactaggagacagtgagggaacatagaataagaggaaactggccttcttgtccccagctggagacttttggaagtacagaagccctttgcctttcctggggctgccagggagtacagaatcgggagtgaaactgatcctgagcgagtgcacagtgctccttgatgattactcctccgcaaattcagagactggcgcttactgcttatctggggaattctgaaggcaagggggcagctggaacagccataacgacagcaaaatgagggggtgtccgagagtagcctrctttttttaatcctgtggcatggaaaggatgtgtgactttcccacagatgaagaggatgctgtgaaaggtaaaagctcccttaaaagtttcttgcttcaaaggtggcttgctaaggcaagagaacaccctagtagtaggttgggatgggaggagatatatcattaagaataggtaagggagaatgtcaagaggcgagcacaagcgtgtgcttgccaagcttctaaagaaacttcctgtgtaccccactgaagtgctaggatttggatgtctgaccaacccagaggtcactgatggccagccagtattaaccaagggagggctaaaatgcagagtaattgaagccaacaacaaaacatgcacctttcctttagtcttctcttcctctgttctgaccttagagaaaccagaagagtggggtaaggataggaaggaaaagagaaggaacagtccagtttcttctccaccactgcagccctgagttaggggagtagaagagaagctttgaattggatatgaaattaaattttgatttagactggaccagatacctttaatccctgcatggrtgccatcattgatggaatggggcttctttgtatacctgagagaatggggcagctatgggatctgcctgagacaaggactgagagatgcatatccaacaaagcatgcttaaaagcagtgattggagagaagtaaagccatttcctgctaagttcagactgttcagtcaattgattatactgagagagattatgcagtaaagttatttagctgackggtaaagagtctctttggggatggtgtgcccagcgcacaaggttaaggagttggaagatttcttctgtgaataaaatcaatgtttggggctcagtctatcgggaatgacttattactagtactaaaatttgtgtgtgtgagatttaataagtctttaatatggtcttcatttgttgcttcatttattcaaacatttattaattgcctctgtcttacacatagaaaaaaacctaatgctaaggctgttgtcactgcgctcaaggagaagaggaaaataacagtaatttatacctgctagtatgtgctaggaactattttaagtgtgttatgcacacaaatctaatgtaattaatccaaaaggtagttgcttttataattgtttaataatgaataaaactgtattgcaaaaaggttaagtaatttgcctaagattatgtagctagtaagagttgaggctggaatttgagcccaggaactcatgctatgctgcttctcataatataaggtatttcctctaatacagaatttaatttagactgtgactaagtttaaagacaagattacaaggagaaggattaatgtgacctgaaaacattggataagacttcagactcatatgttccaatgctcctggaaggccaaccataaatggaaggtgtatytttaggacctggaatgaaagggcacggtagtatcatttcagagtttcagctgtttgtaatatttattataatatcttttttggtcttatcacccagagacatgttctttgcaataaaatagacagcttaatagatttctttaatattatttggagcagacatcataatttcatttagactttaagccttaggagatatctatatatgtatctataacatctgtatctatattatctaacaacgtctgtatctatttgtatttatatctgataatattggtgggtcatttgtagagttgtccttgaattctggaacaaatctcttctgatgcattctgtaaaatatgaggaaaaagcctttaactctttcatatcccaatttgggccaagggaagtcatagctatagaaaaatgacaccctcaataaacaggaacaattagaaggctattgcttgttgtattttgggaacagctttcgaatgctggctttgtggcacctcttaccccagaataatgtggtattatcttatatatgaagaatttagcattctagctgctgagaactcaacatttctaagatgctgagattatgtatcctatcacttccagaaacagtttttggaagaaagagagtctaggcctacagcttcttaggaaggcttaacacagggtttttagttgtgctattgtggctcctaggcaaagtgcagaaatgagagagccagtacctgagtcctaaacctccttctgacaacaatcctcttcatgaccctgggaagggcaatcmactttccggaacctttttatcacatatgaaattaaggggtttggactagatatctaggattctttcctggtctaacatttgatgtatttctctatggttcaaagcataacctaatggggaagtttatgacattctaacatggcatactgggttaggagtggatgttaaaatatttatttataccactctttcatcagtaaatacagaaaaaactggtgtgaaacttaccagtagggcaagaagttgattacctctcttgttttgatctcttttattacatgtctttgttttgcaggcctctacacttcagtgccctccttgacctagtaataaactctcctccacactgaagccttcactgaaaacttcggaatagaagttggcataaagtatagtaattaygactttcgtggactgaygtgtatgttaaggacttcaaagcatcctactattcagatgtgtggactgtgctaaagtagaagaatctataaaaccaaaggaaaacaaaagtgacaaaactggaggagttttatttttatggagwcagatgggcaaagtaaggtaggttgaatgccacttcagttctaaaagtctatttattttctcttggtctgactggaagtgccatctatatagcccaacattttcaagagaaggatgacgatgaaggcttccatggcaaaataatgagaaaattgtcaaattgtcaaaaatcaagctttaggattcaacctttgacactcatgattcatgatatgctttctttactcagcagtggtgtgtgttactttaaatgtttagaaaacatacatgtgcatgtatctttatagcagcatgatttatagtcctttgggtatatacccagtaatgggatggctgggtcaaatggtatgtctagttctagatccctgaggaatcgccacrctgacttccacaatggttgaactastttacagtcccaccaacagtgtaaaagtgttcctatttctccacatcctctccagcacctgttgtttcctgactttttaatgattgccattctaactggtgtgagatggtatctcattgtggttttgatttggatttctctgatggccagtgatggtgagcattttttcatgtgtcttttggctgcataaatgtcttcttttgagaagtgtctgttcatatccttcacccactttttgatggggttgtttgtttttttcttgtaaatttgtttaagttgattgtagattctggatattagccctttgtcagatgagtaggttgcaaaaattttctcccattctgtaggttgcctgttcactctgatggtagtttcttttgctgtgcagatgtgcagaagctctttagtttaattmratcccatttgtcaattttggtttttgttgccattgcttttggtgttttagacatgaagtccttgcccatgcctatgtcctgaatggtaatgcctaggtttccttctagggtttttatggttttaggtctaacatttaagtctttaatccatcttgaattaatttttgtataaggtgtaaggaagggatccagtttcagctttctatatatggctagccagttttcccagcaccatttattaaatagggaatcctttccccattgcttgtttttctcaggtttgtcaaagacacgtatgtttattgcggcactattcacaatagcaaagacttggaaccaacccaaatgtccaacaatgatagactggattaagaaaatgtggcacatatacaccatggaatactatgcagccataaaaaaggatgagttcatgtcctttgtagggacatggatgaaattggaaatcatcattctcagtaaactatcacaaggacaaaaaaccaaacaccrtatgttctcactcataggtgggaattgaacaatgagaacacatggacacaggaaggggaacatcacactctggggactgttgtggggtagggggaggggggagggatagcattaggagatatacgtaatgctaaatgatgagctaatgggtgcagcacaccagcatggcacatgtatacatatgaaactaacctgcacattgtgcacatgtaccctaaaacttaaagtataataataataataataataataataaatgtttagaaaaaaattctatcataaatatgaccatttaatttcctacaagtttttcaaaagtttcttcttgggtttattcatccctatggaaaattccttagagagatttargaatcttcagtgaatacttttagaacaaatggaaagaaagcaaaaatgctgtttcatcattgagaaaaataaaactcaaaacaagcttaaccatcaaacctcttctttattccaatttgtcatatttgtaatagcaacaataagctsttcttagaaataatgtgttcttagaaataaataaaatgcatgtttcttactgctaaatgccagtgtacaatgaaatttccaagccaattttttggggaaaaggtgtaacttctgtataatgtatttaggatcttaagtggcatatttctgttggatggtttatatgttatctatagatagcacctcactactaaggcataataaagaaacttgtgctcaaagaggagggataaaataaaaatagaatttgatttcaacaagtggatttgatcatttgcaaaatggtgataacaatcctttctctaactcacagcattgtcatattattagttaattataatgttaatagtactaatattcatcatctcagtgttcccaagagggtcccaaggaggtcatactaacttcacttcttatattttccagtttgttagcttacaagttgtaactgcagagtcttagcttcacattcaccttcccccaccatttctcctcaggtgtgccctagtgtgaactaaatctgtcactctttttctgttcttttccttaaggggtgctgccatgagaacgcagatcccctacttctctgaaaagtgcagtgacattcccactgctgtgttgttcccccttagtttcttcagacacatctacaattttccttcctcccagaactgggaaaagctctttttctttgcatggactttttcacctgagtttgaaagcaccgggcatggttgtgcctttaagtttcacaatgctcttcataaaagtggtctgaacttcagcatttctttttttttccctgagatggagacttgctctgtcactcaggctgcagtgcggtggcacgatctcagctcactgcaacctccgcctcctgggttgaagcaattctcctgtctcagactcctgagtagctgggattacaggcgcccaccacacccggctaatttttgtatttttagtagagatgaggtttcaccatgttggtcaggctggtcttgaattcctgacctcgtgatctgcccacctcggcctctcaaagtgctggtattacaggcgtgagccaccgtgcctggcctgaacttcagcttttacttgtagtctctctctctctgtgtgagaatgagcccttgttttgctaagccagcctggagaatacatcccattccaccctccatttttttttttatcatccttcttcctttgtttcttcctcaagtctctcttttctcctttacaaaacacacacacacacacacacacacacacacacacacacacggacaagagcaacaaaccaagtatatccacccacaaaaaaaccctccaaacatcattaattcatggaaatagatggggagagacaagactgtcggccccacaccagcaatcactgactcagtctaaacaaagagtaacataataatggtatacaacagagaatcaccgtttaaattttatgaccaggtctttaataagtatcttgcagcctgttatagaaaaacactttcaaatagtgtgatatgtctcataatgggaaaagcgtcccccrgaagtactgagcatccagcaataaaggcatttaagtagacatatcatatgatcaactttaagaggcagtttccaacatgtgttgtcttcattgccggattggaagaaacccgggggcaacgtatcatttatttagcrtaacattgtattttgcataatactagagtttctaaagaattttcatatatactaagctattttaatccttgcaagcaycctgtgaaataaagcaaggactctgcttatttaataaataaggaaagaggctcagcatgattcataaattttcctggagtttcaggactggcaaatagcagaattggagtgtgatgccagccaattatatccttaaactttacatatattgcccagtgtaaaagttcaagaatgcttatttctttgttatctggaaagggctgctgtaaaagcaaacctaagtgagactgtttgatcgtccatgcctgccccaaagttccaagaagttttgaatcacgtaaaaacaatcagaaaaccctgttggttttattcctttttttcctccatcccagctggactgaaatatgtaaaatctatgggatttcatgtcataccaactgtgcaaattagtggcacaatagattgtgagtttcttcagggcaggaacctttcatcttaatatttcccccttatgctgcatagtattgacttaaatacacacacacacacacacacacacacacacacacacttaaagaaatggatagatggagagatggatggataggtgggtaggtggaggtgaccagggaccctaaagtctgtgactcaaggatctaggcccagttcttaaagactcatattgcagctgattttttaagaatctccccaactttctcgctaccattcgacagagagagagacattctgctacattttttctcctgggtggcctataacggttcacattcaccagttcttgtaacttgtttttcactcaaacccagcttgctgttagtctgctgtgtctaaatagtcatggatcctgcacctgctctaagacaggctgttaagtgaggcttcctttcggagactgcaaattcaggactccaggcccctcagaatggttgtttcatgatttatagctggaggtgtgtacttctgtgtgctgttggtcaatgatgataaagtaggtatcagtgcctctgtgaattttctgttgccctttcataaccaccatttaggagcatttaatcaggaataaagtgctaggggtgggaaaaccatttcaggttgccattgcactgtggaggcaattgtggacttttcccccccatattttctaaactactaaaaatagtgtttcacatttacctgcataattttatgtctgctctttccctgcttgagcagataacatgatgacagcttctctgacccctaattttccttttattttcaactttgaccatggagacatgttaagccccaaggaagcactcatttttactatcaacaggtatagttgcccccttaactggtcataatgtctgctaaatagcatcaggccctagtaatccaggaggcaatccacattcccttactgaaacagagaaggggaagattcaagatggaggggatattgaatagttgaatgtcatgcctaagtattcttacacgtttacaggtttagtatgctgtggatattgatgcttataaatctcaagattttggcagttctcaaagtacagtctctatcaccagtagtatccgtatcacctgggaacttgctaaaaatgcaaatttgtatccacccccatccccaatctactgaaccagaaaatctggcggcagggccagcaatctgtgcatttgcacagatgattctgatgctcactaaaaattgagaaccactggttttaggaagtttacaaaagactgaacctttttctttctgtctttttaaaacattggtgtggacaaattaaattgtcccttttctgaacagcatttaatcatactgaacaattattcataccttttcttaagcatatgttaatcatattagaaatgccattcccttctcgtgcaaaagggcaaaatcagcaacatccttccaatgtgggtgggtaaatgaaggctctgatacaagaattgaaatgaaatatgtgtgcaaacagttcttagtactgagctgtttaaagaaggcctacctttgcacagaaaatgtctataagaattactcattaatgccacttaatagaggaagagtaggagataacgtgggaacagggtctttttaaaaaataccactttaaagaagaggcttatgcttcatcatagacaaaatgctttgtatagtactaacaggggcatatctattcctttaatgacactctaagccagtgctttaaaattttattgttgtttttattgcccctggaattccatttatctatgatagtgttggattaatgtgtggtaagcacattgccacatcagtccatgattaattagccgacatttattgagtacttaatatttgacccaaactggatcaaaactggggaatatagaaactgtcgtctctgctaacaagtttgcaatctagttggagagatgggagtaaaactcctgaaaaacttgggctcaataagataacatgatcaagagtgaggagacatgatatagactgcaaatgcagggaaagtgcactttgtggagtggtcactccagtgtttagtatgtcagaaaggaggcttcatggggcagacggatctcaaaggatgcctaagttcagcagtggattgtttgcagaaatggcctaattcttcccctgcttgtatctctgctctttggcattgcaacttttcaggtccttatgtgaagaggtagagtctactcctctgcccctggccttgtaatggtggcaatgttgacgtgctaattctgattctagacctcaagagacctcgcacatctccggccactctattgaaacacaaccagctgccatgaacaggcccaggttaagtctgctggaggaagagaccacattctttatgagatgagatgtttcagcagaagccatgggagactagatagcccccagcagagccatcaatgaggtcaacagaagaactccaccctagctgaacccagtccaaattgccaacttgcagaatcttgggctaaatgaaccaacaggtcaccaaatgttgaagtggtttgtcatatagtgacagataactgatacaaatctggaaggtagagaggaagaaagtgttctaggccagagttgtacctcccaaaaagtcgagtcagaaatatgggaggccaggctaaagaaaagtaaagaaattagtaggattggatgtttgaaccactttctttcagtaaatcgctagaagcacccatgcagggttcaagtgaacgtatactggaggccagacctgcccaactatgctgctaaatggtgatcttctcctgaagcgctccatcagggtatgagtaacagggaactccccttgccaagacacacagggagtgtgatgaccctgtccctccaaactgcactttgagagaatggaaccttgttttgtagccaactatattatgccaagaacaaaaagatctttgtagcttatcatctgtttttatgttttatataaaaatctaaagcttctatgacatactttcaagaaactgctagaggcaacacgtagaatcccagagtaaagatattatgaagttagagtactttaaaattcttcagttctcacagtgtggatctatcgcccattgaataacaactttaactgttttatgaggtcactgaatatatttttcactataaaagaacatgagagaaaatatttaccttgaaatgctaaaaatgtgttccctttctgtggaatggcatttgttgaaaggaatatcccgggagaggatggattcttgttttagacatagctctttaaatttggcaggacatgtgggggtagggggacagatgggggtggagttgggggagcttggtattcaggtggcacaataccaggtggaggttaaatacctacaactccttatgcctgggatcttttgttccaatagccatagaagcttctttcatttcactttttatttttattttttgcaaaacccattagttgacaaagtgccataaactttgtacaaaatggcctcgttcagcaaatattttattcaaactatgctcctatcagcagtaccacacatgtcataaagtcatggtgaagcaggaatttcagtaaaagaaaaggcgggggtcatgaagaccgaaggatcaaaggagcatggagtagaggaggcgtcacatctgaagtgcacactgtgtgtgcgcgctgcaaggagagagagcgttataaagttgttgttttaatcgctgcttgtcgcctgcgaacatgttgctcccttttaagtgtcaagcaacgggttcacccaaaacttttctgcaccgaggacccgcacgcccggggtcccacctgcccctctctgcctgcctcccaccggcgcctgggcatcctgcgccggctacaggtccttgctcactgaagcgtcacctctcactccccagtaagcctccgcagcccactcggactgcagcctgtttgccgcccgtcctcccattgcagcactcggggcgacagagagggaggaggcgcgcggggacggggacgcccaggaggacccactcgcgggtcccgctccgctccggcagcagcatggggaaaggacgcgcgggccgagttggcaccacaggtaaacaggctggcgaggcgcaggacgctgtcgccgccgcggccacccagcgatttccaggcacgcaactccgcctccagggctctctccctcgcgctctctcccagccgcttgctcgcagccccagcagccgccgcagcatcacttcacacaaaggactgtcacccgcggagcagctcctccacctccacgtcctcctccggtgacagcagccccgacagcagggctcgggcgcggcggcggcgcggggggtggggggacctgtcactccctgtaactgaggcggcggcagcggtttttttgccttttctattttgccttttttttttttgcccttatacctcttcgcctttctgtggttccatccacttcttccccctcctcctcccataaacaactctcctacccctgcacccccaataaataaataaaaggaggagggcaaggggggaggaggaggagtggtgctgcgaggggaaggaaaagggaggcagcgcgagagagccgggcagagtccgaaccgacagccagaagcccgcacgcacctcgcaccatgagatggcgacgcgccccgcgccgctccgggcgtcccggcccccgggcccagcgccccggctccgccgcccgctcgtcgccgccgctgccgctgctgccactactgctgctgctggggaccgcggccctggcgccgggggcggcggccggcaacgaggcggctcccgcgggggcctcggtgtgctactcgtccccgcccagcgtgggatcggtgcaggagctagctcagcgcgccgcggtggtgatcgagggaaaggtgcacccgcagcggcggcagcagggggcactcgacaggaaggcggcggcggcggcgggcgaggcaggggcgtggggcggcgatcgcgagccgccagccgcgggcccacgggcgctggggccgcccgccgaggagccgctgctcgccgccaacgggaccgtgccctcttggcccaccgccccggtgcccagcgccggcgagcccggggaggaggcgccctatctggtgaaggtgcaccaggtgtgggcggtgaaagccgggggcttgaagaaggactcgctgctcaccgtgcgcctggggacctggggccaccccgccttcccctcctgcgggaggctcaaggaggacagcaggtacatcttcttcatggagcccgacgccaacagcaccagccgcgcgccggccgccttccgagcctctttcccccctctggagacgggccggaacctcaagaaggaggtcagccgggtgctgtgcaagcggtgcggtaagttcctcgcccttgggggcgcgaacccgcggcgaggagggcgcatcccgggcgcgcgggcagcggggctcgacggccgcccgagcaaggcagaggcgctctgggtcccagttgttggtttcagggtggtgggttctcagcgatcctcagagagggaggtttcgctttctccagcttcccttgtcttaggctttgccactggagaaagcccaagtttagtcctgggttggggcctcctgaaactttttaatcctttggggtttggctcaccaagtagatcggaaatgtgccggctgctttcttgtgggtgatatgaacttggctttggttaggagttgctgattctgggcctcctttgaaggaggaagggtgagtcccgcaggattttaacgccttcccttcacttggagtccagagtgtggagatggttaggggtttgcttctgtgtctgtgaagtctctgcaaggaaggggcagtgcactgacattccccgacagatgtggcagagttttttggcaactcaatgtccagcagagaggtgcagtctgtaccttgtgaatatgtgtaatatgtgagaattataaagttgttattggtgggggtttttttttttggccaagtcatctcaagaaattttgttttcacaatattttggtttggaggatgtttttgcacttcactgcatcagaacagatgaacgaaattatggaatatcacatgtaggccctgaagaagaagaattttggaagtttagcaattatttgctacaccttttcccacttaccactgaaaagtattcttcccgggtctgcttcatatgatcaggtttgagaaattagctgattatctcatttcgttgctgaggtagcattatgtttatgccattcataaactaatttctatgatctaaatatctgtataatttcctgattactatataatcactaacacatagcggggtttcttctcaaacagtaaattaacacgattacacatcacaaattccaacatgcataatagcttttccccctggtctttatgtatccgtctaatagacgtttgggttaattgaatttttataaaactcagcaccatgccaagcagagtctgcctgtgatggagagtgtgtcagttcttttaaatttgtgtctggtgggggccaattatttaaatttctggttggcatttgtggtggttaagtcctgctgttaattaatacctgatgatttggttttaatgacagcaaagatcattgttcacccaccattcccttatctgaacaatgtactttgtatgccagagacctgttaggattgcaccactcagtggacagaagctgttcagagagtggtgctgaagaaagctaagtggcatagggattccccgagacccactgatagatgtcactccaaagcatgggaaatgctctgctgggagctgtcttattaggcaaccgaaaagctcagcaccatcgtactgcagcatatgttactctgttacagaatctgaaacaaaaccttttaagcaacaccactgtccagttttcatatgttttatagtgtgtaattcaggaaggatttttcctttatcccaagtcatgagttttgaatcattcacaccacatggtgggaagttaatataaaggggattgtagttagctgtgatgcctaggattgggggtgcattactacattatcaattgtgttagttataccttttaactagaaataaatgtaagacttgagaggtaaagttcttacaagcatccagagaatgtttggaaatggaaaactcatgttgtttggaggaatcatattctattcttgtgcttctaaggggaaaaaacttcattgaaggtacttagttttgtccctcagtttgccagtcaaaagaaatataatacatagttgtaagttgtggcacgttttaaaaaaatgggtttttaatgagctggagatctttttgcatgtaatcgagtatgttaagaaatcacaaagttactgccctggatttctgtagctattgtgtgtgcttggcgatttttgtgttatatgatttaaagtaggatattgcttttaacctcaaatagatttagctaagttctaactgaaatcatgctaaaagtttctcctcgcatttttacaaacatagtgtttcttgtaaaactggaggataaaagcaaataatatcagctattttatatgatgtaaattcagtaaatctgcacttggaatattgagtgtaaaagtgtgtgtgtgtgtgtgtgtgagagagagaatgaatgaatgtgtgaattcatccagttgtgtggtgtcagataatgccattcagaatttgccaggcaaagaaacacagaaaaatggaaaagagagagagagagagaactagcaagaggaaagaatgagaatgagaatgggggctgatttgttctggttgagctgcttctggtcagaagatttcagggagagtgatggagcagaaggccctcacctaacatgaagctgccctgggggcgtgatggttgtgtgcaggcttgagccataatgctaggctggagaaggaatagagcaaagtcattttgtgatatcatacccaggggaacagtttccagctctgctgctctcagctgctgtgttgtttcctacaagttgtttgctagtgtagaaactacacatgcaacagattagccttagggttgagttaataaaaatctttcctcttgaaattcctttttctctttccccctcatctaatataaactccggaataatgtcgataaaacaagaagctctttgaaaaatggacctttggaaacagaaactatgagtgtattttagaagacaacatggaaattcatagcttaattgctttgtagttgaagtttgtataaatgacacttcctttacagttatttaaagtgtttgtagtcttcactttttctgttgctcactgaacgacctaagaaatatccttgggttttatgttcattggaatgcaggataatttgctgtccgattaaatctctattattcaaacaagtcattgtttgatgtgctacacttttagcttccaaagcattgtggttatatgaggcagaagctgatttccaaaaaggagtacaaacactgaggttgaataacatctacaattgggctatgccagatttgtacatcaattctgatcttacaagccaatataagtattttatatcatatgatggtagaatgaagatgtatacatgtatgcatgtattgataatgtaaacatctttatcaaatatttatgatacatagcacttgctctttttaatatcttcagtcactatttaataaagtgtgctaaccttatggtgttttgaaaatgaaagaaaatgctgcagagattttccagtcagcattaaagaaaactattcttaataaaagctatattaaggaaatagaaacagtaacagatatagcctgactgcttgtatgttgtaaatacacatgtaaatttaatttcccaagtgtttgtgactgctctttttaaactttataaatcttgctgtcaaaaatctataccggatttaaaatagctacttctactgagtagagaaactatgtatttatttatatgtatgttaaaaatgaaaccaacataggtcatttgggagaagaactccttagaataaaaatattttaaaaagtggatttaaatatctgagttagaatatttcactagcactaggggatcgttcttgttgttgtggggtatctataaatcctctgaatgtaggraaagtcttaccatatgtcctgatgtattaagtaagactaggagctttagacaacagagaattaaaacagtgagctgtacttcctctggcttgtatatttatagcaaatgagagcaaaagatgtgattgggcgggttattgcccttgtcaaatataatctattcattcttccggaaatctcctttgcttcgatacctattttcttcctgtttttttttcttaattataaacataatgtcttttacaaccctcttgtacatttcaatgacaatttatgaactgcttagatatccaaagatctctaaatcctcatagcaatacttagccttttatttgttttaaatatggttgaatgatctgaaaaaataatctcttttgatagctcttaatgaatgggtattttgattagctttgtatagataaatgataatgaaaacaaaaagtatacaattagggttcttactgattcaagcaatttgttaccaccccaaaatagtgcaacatggcttagtgaaagtcttcataagaaagtaaaaactaatttacaatgttcttatttcctaatcacagaaatgggcattgtggacagttttcaaccaatatatgaatactctaaatttgtgcatacatattgttactccgcttttatgttataacatgtaagttaaaattactattatgaaagaatatataacctggctagtttacccccaacctctccagaatatcagtcgctttatagtacttgaacgtttgcttagtgacacattctgttgaaatctaatgttgaattatttgtggatttacagaatatacaaattcacaaataattgtatgactaagacaaaacttggtcattttaagttgagggattgtcctagttgagaggttgtgttttcatattgcctaagttgttgagtgctgtagtgcacttcaagtaaatctgtttctgaagacttgccccctggattttcgtccctaaattatccatacaggttgaagcagataaaatacaagaaattttggtgaagttgaaggttaaaaatagattgactagtctcttcttggcatagatacaattattaggaaacagttctccctaatacagacttgccatccaggcatcctagagagagatgcatatgtggtaatttacattaatttttggtcttcttcaggagaaccaggatatttttccctacggaaaatagtttgttaggaagttctttcctggcccttgatttacctcatttggacctagtaaaatttatactttgttttaaattacaactaaaaaatcaaaaagaagaaatgttacctacagtctggatggaccgtaagagactgtcctactactttctaactcagacttctgtgttttttcttttcttcttctttatttcccctatgaagatactacaggggaagccttgggtaaatgatggggcccaggagtggattgtagtgtatgagtttaggattgctagtcattatcatatggactagccttctctcgaaaccttgaaattcagctgtccgggtccaaggaatgttggaaaatagaggtcttagatcacaagactgtgaatgcaaatggtctttctgtttctgatggagtctttgtccatcccatgaggacgtggatggtaacctgcattgcatctctagttcagaggctttctctccaaagcccaaggctctgtctttggacatctgccctggcttgctgggaacaagaaaacagctctgagtggtgcatgaatccggagctagtagccaggtttatgaggtagcaatggtccaagggaacctagaggagggaattgtttccttttcttttgctctgctgtgctagaatatgtgagctgaatcaagcccagtgcaagggaacatacctgatgagggcactagagtcttggtactgggtatacctaagagcccaggggatggacgagggataagaaatgtgaagtactgtcagcttcactaaatttggaaaatgcataccagtaatactatcatcccaaatggttgtcttttatctgggaattgccattaaggcaaagatagctaaaaaaattgagggcatactaaaaccacatagttataactaccacttatggagttggtaaatttttttggcctctttgatagacacatagagtttgatttttatgtgtagattaaattcctgttgaataattaatgaataaatgactgaaggaccccagctggttggatagtggaaatcactgttctagcctaaatttagaaagataaaaacatacttttgatttttttctcttctcatctctgatatggtgagtttgataccaggacactgttcccttctcttcccatccagagccttactgtaatctggatcgacctttggggcttcagagaaaggttgtttaatttcccaaaacttttccctcacttatttttagaacaatatttgttctgtgtagcttatagcccagcaggaaaaaaaaattccagtgttgtaaatgcttaaaagtacagaagagttttgctgtagtctatgaacccttaccactgttttcagcagaaccatttgtaaaccatcccagtttattttgggtgacagacttcagtattcagaaattttgtgttctccttggatctctcttcacaggtgtttaaccatctcagtactgtaagtgatactttatgttgaaattcattctcataactgaagatggaaaaacacagcttatatccctaagaagtaatacaaagaggttttagatcagttcctctttacttatttttcttgtttccaatatcacaacagctcttggtttacctgcaggtggggtggcatgtgcccatttgggctctgatgaataatgaggttctttgccttcacttcctcagtcggccctggaggcactgtgggagatgatgtgttatcagtgaagcagcagatgtggtggcagcattttcctccactgcagggagcatcccgtctgtacctctgtacagagcaggggagctgtctactgagaaggaaatggatggctgtgtttgcttcacatagaatttctcattagccttgggaagtggttctggcagttggggccccttggtggttgccaggatggagaggttctgctcagagtgggtgtgctcattgtcctgtcatctgcacaaagggccacagcattgagataacctaggcatgctgctgctttgcaagcccggacacctccggacaatcctttcctctgttgtcttcattcccatccatagagatgggtcacatcttgtcctcaggaacactagcacctttctttttgttggagcagaaattttataaaacaccctagcattttggaatatagttttattccgatgagcagtttagaaaaatttatggtaacataaaatttaccattttaaccatttttaggtgtgcagttcagtggcattaagtatttgcattgttgtgtaaccctcactgcaatccatctccagatattttatcttcccaaagtggaaactctgtattcattaaacactaactccccattccctttcctccttttccccaatcaccattctactttctgtctttacaaatttgactaccctttttttttttttttttttttttttttgagacggagtttcgctctgtcgcccaggctggagtgctgtggcgcgatctcgactcactgcaagctccgcctcccgggttcacgccattctcctgcctcagcctcccgtgtagctgggactacaggcgcgcgccaccatgcccggctaatttttgtatttttagtagagacggggtttcaccgtgttagccaggatggtctagatctcctgaccttgtgatccgcccgtctcggcctcccaaagtgctgggattacaggcgtgagccaccgcgcccggccctacctttcttaagtgtagagttcagcagtattcaatacattcgtaatgttgtacaactatcaccatcatccatcgccatactcttgaccttgtaaaaccaagactctataccaattaaattacaacttctcattttctcctcccccagccactgacaaacactattctactgtttgcctctctgatttttactaagtgcatcatttaagtggaatcatatggtatttgtccttttgtgactggcttatttcacttaccataatgtcctcaaggttcatcatgttgtagcatatgtcagaatttccttcttttgaaaggctcaataattttccattgtatgtaaataacacattttgtttattcatccatccatccatcagtggacacctggtttactttcacattttggctattataaataatgctgctgtgaaatgtcttctcaaatccctgctttcaattttttgggtatatacacagaagcagaattgctgaaacatatggtaattcttttttctttttttcttttcttttttttttttttgagatggcatctcactgtgtcgcccaggctggagtgcagtggcacgatcttggctcactgcaacctccacctcctgagttcaagtgattctcctgcctcagcctcctgaatagctgggagtacaggtgcatgccaccatgcctaagttttgtatttttagtaaaaatggggtttcaccatgttggccaggcaggtcttgaactcctgacctcaggtgatccgcctgcctcggcctcccaaaatgctggattacaggagtgagccatggtgcccggcctcatatggtagttctaggtttgctttttggaggagctatcatactgttttccatagcagctgcaccattttacattcccaccagcagtaaacaagggttccagtttttccacatcctccctcacacatgctattttctactgttttgatactagccttcctaatgcacgtggagtagtggtgagcagtttttatattgttgttgttttctatacagagttagtgtctctaattacactgtcattaacaagaagcaaaagttctcagaaaagagaggtgttcatttattcaactcttagtttaaatagcatgtaagatcctgaatctgaaaccatgaaataaggaaattacaatggataacagcttaataaaaacaatgatttaaagagtaagcttagaaataaagaattgagtaagcttcgatttaaagaataagcttagaaataaaaacaatgaaagatgtaaagaataagcttagagaatggacttacagaaaacagtcctccaaggtcatcatgagaatattgtatttttattcatattgctatcagtgtagtccagaaaggaaccttatcatactttgattagtttcagaaccttttaattgatttaatgtattcattaattgcctctaccccagcaatttccctgtctgtattcctgtccattgccccaatccccttctaatcagtacgcaccagaggctgagtcattctaaaatactacttttttttttgtttgtttcagacagggtcttgctctgtcatccaggcgggagtgcagtgggacgatcttggctcactgcagcctcaacctcatggactcaagcagtcctccacttcagcctcccaagtagctggtatcacaggcccatgccactatgcccagctaatttttgtattttttgtagagatggggttttgccatgttgcccaggctggtcttgaactcctaagctcaagcaatgctcccacctcagcctcccaaagtgctgggattacaagcatgagccactgcacttggcctgaaatgctacttttcttaggccttgttccctacttagaaagtttcaatggatgcaccatagttaactcaagatctcaacattcaatatcctccttagcctcaataaagccttatctttctcaccttcccatatgaacacttcatccactctgactgctccctgaacaggccaggcactttcctaaccctcctgtttttacatatgccatttcctctgcctcgatcttcttccaccctcatttctacctgtggaatttctgttcttccttctagggacagctcaaatcctactgcttccataatgaaactagtaatgattcctaccagggatatgcactctagaatttgaacacagagctcctctttcctgtgtaccttacacaaggtactgttacaaattttccttctgtcatattgtgtttgttacaatgtatgtattttaaaatttttctctgtttctgtgtgtcttgcctcactggcagccaacactattcttgtgtttggatactagcagggtcttcagcttacttgccagtgaaaagtgccctggcctcgagtcagaagaatcctttccactttcagctttgtagttagtacctgtgtgattgtgggtcgctgactttattcactcatttgggtctcagtttcctaatatgcaaaacgagaaggtaaaatgcttttcaaggtccgtttaaactgtatttggtcctcagaaatgacccaaacatagaaatctccttcttctggagctttttctggagcttattttctcttcctctcctcttatttagtgttgttctcaggagaacacatgtgggaaaacaactgtgaaacttttagacactctaagagaggagaaagagagctgaatgagagggaaccttcaagggaaggtgtctcttttctccaaatcttatctccatggcctttttgtgtcatttaaaaaaatattaacagttatttgcattcgctggcatcgtcttttcaaaaagcaaatatgattgcctctgcaagcctgtctttgaaatgataaagtatgattaatccacagctgtattctttagaatgagaaagttcagtcatttgtggtgctaaaatgaaaaaataaagatttgaatggttttactatttactgtgaatttatttttacaatgtagatggggcattgttttaggttctaataattagcactgttgctgaaatggatgaggtcagcacagagagtgtggagagcttggttttcaggggggtggcagcagttctaatggctgcagggcgaggcttcctgctgagatgccagtgttgggttctttctcaaattatgatttttatggtttgggcaagaaaaggatgcatttaagctcttttataagtaaaatgagcaatgctgaaacagttgtcaaatgggaataatttgatctgacttttacaatttctgcatgaagaggtattggcagctccatggcattggggcaggatgggcagggcttagctgggctaggtccattttttttttccttcagtttaacgtctccgacccctggtggattcacctactgcagaagagccaatgctgcttataaattatgtttcctcaatctatatctctagcccagacctttctttttggctctctatctgaacatctaactacttacctggtaacttatgtcctacaaacactttatgtgaaatattttaaccagtgcctcatctccactgccagtccctctgcacatttgtatcctaataatgactctaccctcactgctagtatgatcaccacagttattcccagtgacttccttggtcgacacttatttggtgccagagtagtaggcgctgagataaattcagttaacccctcaccatatggcagcattaatattttttagttacctcaaaccagatacctctcctgctccataccagattagtgaccacatcccactgattctacgtccttaacaaatctcagattcgtcccgtcttccctcacttcaacttctctgtaatagattcttactgcaactgtaacagcctctttatgcatggattctttccttctcacatccattttctatactgttgctagagtggtctttctaaaatagaatagatggtactgtgcttttacctaaagcttttcggttgacatcaggataaaactcagacccctttgaatggcatgtgagggcttttggcttttgtcccaagtgttcttgtccagttctttctcctatccagaaccttgtgctacactgatggcattctctacatatgccaggcagctttagggctctgtggatttgcacatattgttctcttttcccagaatggtctgcttctctatctacctgtttgttgtactgtcactacctgtcatttcagattgactgtccttccgtggaatggttaaataacactggatagccctataacggattgtgctatagtctttacaaatcttcttgtaggagaaaatatgatgacttagagatatgtttatattacattgtcaagtgaaaagtgttgtataatacatgtgtgattgacttttctttctttgcttttccttttcttttctctttctctctctctgtgtctccctttcctttcttccctctttctccctcccttcctccctccctccctccttcccttccttcctctcttctctcctctcctctcctctcctctcctctcctctcctctcctctcctctcctcccctcccctcccctccccttctctcccctcccctcctctcctctcctcttgtcttcccattgatctttcaataaaaataaaagcctagaactctatgtagctaaacgttaacagtgtttatctctgggtattgggattattgatctttagaatgatcttcattttgtattttctaaagtttctataatgaatgcacattactttttaacaagaagtagtaaatgctattttcaacaaaaaatactgacttgtggcaagtactatgtcttacttatctttgtctttttagaacattgccttcctcatggaagatgtattagttagggtaggctaactgcagtaaccgatgatacccttaatatataacaagtaaaatgcgatagtttatttctacctagtgaatgaacagaacacaagatgttctggtcctgactttcccctgaataaaatctgcactaactaacaccgaggcatagccaaacctcacctccagaccaaattggctgaaataggcagggttccaatttgtgacggtcatttatttttaatggcctttctattccctgaaatgtagacaaatttgccctttgctgcctcattgcagtggaagagcctcatacctgtgtgcagagctgatgatgaaaggcatctatgtgtgtatgtgtgttgtagataaatagtgtattaactatgtgtaattccttatttcaaagtagcattttatgggtgagttttgcaataaatcttcaacgtttaatgctcactatgtcttgtttcatttgatatcactgaaaatgcagagggtcaggccacattcactctgtctctccctggcatgttaggttgccttctagagctctgtgtttcacaaatcattttgatgtagagactgtggagaaatattctcaggctttatcactgctgacttaattgagtttcatgatgcgcttttttttttttcatagtaggataaattaaaaatggctgataaagctgcctgtaaaagcaaaattgttaggttaaacctgcctggtgtattaaatgtattgataagtaatttggccaccatttttaatcacttttattaactctcaagtagttttatttccagtaacttgcaaaataactgtcattatggactcagtcatatttctctttaaaatactattgaaaagtccatgaaaatgattaaagtgccaatatcatccacctacttcctgttagcaagaattgttggtgattttgtgattagctgagtatatggttgtgctctctttgtgcaacccaggaggaaatagaaccagttcatcccaggtgaatagagataatgaatgggtttgaagccgtgtaacaggagtagtcttttgtgcatctgtatcatgtatgttattgttatgctgtctttaaaacattttattaaatattgagaagacaagatacttgtgaattatgtgtaaagtgtaaagaatcatgatacgtgtaatgtgcctttcggtgtcatctttgccatcggctgttcggctttgtaaggatcttgagttcaaggtcactaaagaacagcttaacacattgtcttgctcacaggtcaataagggatatatctcttcattaaaatggatgagaagtttgtcattactttactgcttcttggctagatgtgtggcttatgcctgtaatcacagtgctttgggaggttgaagcaggagaatcgcctgaggccaggagtctgagaccagcttgggaaacatagtgaggccctgtctgtgcagaaacaaaaaattaaatttgccaggcttggtggtgtgcaccttcagtcctagctactctggaagctgagtcaggaggatcccttgagcccaggaatttgaggttacagagagctatgattgcatcactgcactctagcctgggtaacagaataagacctgtctttaaaaataaaaaataaaaaagaattccctgtattttttccaatccatttgcatagcctccaaatcccattcctttcccctcagatttcggcattcccaccctatgggagaaattattatagttgccattcttaggatgtttcccagataaattacaggaatcataagattgctaaacaaatgtaggtggctaatagaaaaagagaagcagtaagcctacttttttcatttacttattcagcaaatgtttatcaggcatctattatttgataggctttgtactgatttctggcttgacaatgatgaagaaattagacatgcccctttctgagctaagaagataggcaaaagggttacacaaataattatataattacagttgtgctaagcctcatgagggaaaagtacaaggtcccagccaggtgaacatataacagaagaatctatcttagtctgaaagatacaagaaggtctttttgagaaagaagcatttctgttagggtagggaggaggggaaaggaggagaggaaagatttgcatttccaaccttggggcagagaaggtgaggaatagcagaaaggacagtcagcacaaaggaagcaaaaatggggtctgagaagtaaggaacaatcagacgattctagacttccaggattccagattttatcttaaaaacaggggaacccaatgaagggtttttaagaagaggagttatatgcttgtcatttcaaaaacatcacaactgctggttataaggagaatggactaaaagggaataagagtgcatgcagggagctgaggtggggccccagttgagactggatgtgtgcctggactagagtgggagctacagaagtgaagagaagtgaaagatttgagatgatttttggaagcttcttttagccttggctgtgatggggcaatgcctacaaagggcggtggggaggatggcccccagtgttctggcttgagcaaattgtatgcacagtaggtgatgcgatggcaaatactgcaggagaagaagcccttgtttagtgtattgtcgacatatccacatggaaataccaaggaagcatgtgcttgtttggagctggaggtcagaagagaattccaggttgtcttttgagtgtggtggttttggacaaggacatgacatttctagctccatgaagtagataagattgcttagggaaggtgggagagtgtaaggaaaagtgaagagaaaaggaagcataaggaacagccacctttaaaggtgaggcagagtgatgggaaagaagcaattagagcagtgaaaggaagacccaaaaaggattcaggagggaagagtggctgctgcatctgtgtccctcgaacatcctgatggaagaggaggaagacagagcccaaaccaggactttttgagtggtgactattgccacacattttaaatgtaagagtgcacattgcatttaggaccagtgaggacttaggacagagttctggccaatgccagaggtggagcccagaccaggagcagactgaagtactatttgccaacttccggttaagattgggttttagtaatatttttatttatctggacataagtagcacaaagctgttttaaatactctgaggctttctttggtggtgggggataagactgggaagaataactaatttgagagacccaatggatagtttgtataaagatatgattttcaaaaaatcatcaaaattgattaagtgttactaacgtgttgctgaaggtcactcgtttatgtgtttttctcctgagctaagaattctttcctatgtaccacctaagccctttcagtgacaaattattgttcaaatttttcttggcacactgacttgagaattaactaccattcatagctggtacccaggtcctatgagaatacaatgccttgtcacataaatacttgtgaagtgacatctatcaatctaatttagaaaaatatttgagtcaaaaggtccttgaaccatgtattaggttgacacaggagctccctttatctgaagctgtgactgagcattttaatgaatggcagtcaaggaattcaaagttattattctgatagtaattgcgtgcatttttcctgcccatctatatgcagccttctcattgtctaggaagctgctgatttgatgcattcatagctattatttgcatagggaatttgaaccaccatgggaagaatgattttgaatttcctgttttcatttatttactttgggtgcaataacagtgttttcatggaaggattttttatattgggtttttcctaattttaatacagtgtaaataagctaagtgttatatttctgaaaaccacacgttacaaatttttaaaaatgggggaaagatgaaaatgaaataaaaagatgggaagacaagttctgaaacctctgaccttacctgcgggctcctccctctagttgaccatggagaaccatagatgacttactgggccagatattctgatcttggacagaccaatggtttgtaaaatgggttgcatattatagtgtgcaaattcctggactagacttccagagatgatagttcatgtggcccagggtttgtcctgagaatctgcatttttgaaaagctctccaggtgatttttagtgtgcacttaagtctgggagctcttggaattgtttttttcaactaataaagttgaagacaccctgcacaagattagaagatggataagaaaagagaattagaatttactgagtttctattatggctgaacatgtttacatatcttacgtcatttattctttaacaccatcttgcaaggtatatcattttgttccaattttaacctgagattcaaaaaggtttacagaactttaaaggtcatgcagctgctgggaggcagaacctttatttgcctccaggtcatctgatctgctgtgtagaaccacgacaaggctgggaacaagaaggtctggatagaattctagtcacaccatcacttgggtgaggtccttttgccctctctgccaacgtgggtacctgttgctaaaggtagactttcctgtttatcatcaaagagtgcctataggtagatgagtggggaggactgcatacattttgagagtagtaaaatcagatccacttggacaaaactgtcttcaatattctacaatgaacatgccatgttattgtgaccagaattgacattgtatctctaccctacgctgacaagttgattgtctgagcgaggaaacagcactcatcatacatttatatttctccaggaaggaaaagagacatggtagagtctagtggggaaaaatctggcttcagattggacttagtacttgaattaagggtcaggcattggcttctacctctcactctgtactcatgaccttgggaactccatgtttctaaactttatttttagttttctctttgtaaaatgagaatgatgtgtctctctcagatcagtgagtaccagctgagatcatgtctgtcgagcacttaggcagtggtaagtgccttctttctttctttgttttgagacagagtcttgctctgttgcccaggctggagtgcagtggtgcaatcatggctcactacaaactctacctccctggatcaagcgattctcgtgcctcagcctcccgggtagctgggattatagacatgcaccgccatgcctggctaatttttgtattttttgtagagacagggtttcactgtgttggccaggctggtctcgaattcctaacctcaagtaatctgcctgccttggtctcccaaagtgctgagatgacaggtatgagccgccacacctggccacagtaagtaccttcttaatgttaatcagcagagggaagggagagtgactctctgcagcaggattcagtggagctagagatccagactagcaatagcagcagaatgaagatgaatcttgactacttgattgctgcatttttcattattttaggaacccagcggttctcctaaaatgcatgccaaaggtcctttgacagggtgctgctccagctgtggtttgtcggtctgcagtgttgtaccaccctggtgctcattaggactgcaaattcccaggtcaccttcagatgtaccactctccagatgtttctcatgctcactgcagtatgagaagcactactttaacaggcaacctccttccaggtgaatcatgtctggagaagttgcttggtcagagagatatttgtccaggctcagccatgctggctctgcagcgagggttccttcactagaacaccatgcatttgtggtggcagcataggtagaaggcactgagcggaaacaagaggagcgagatggagaaagaaaaaaaacaactttcccggaaaagttaaaatgatagcatgacctttctgaatggactttgggacatggcaccaagaatgagcaataatgaaataccaaggaaggagactccttaggagagcatctgggaaccatgcaaccatgcgacaagaggtgatgcagggaagctggtgagagggtgaactgaggctcccccaggggcgaggggggatacctcctttctgaacctcatgctgaacccgaccctcaggagcaacagattggggtaggagcttttggagaggggaattgaaatggccttgttggcagaatgactctgaagggaactttccagcacacccaggaaaaaaacaaaacaaactccccaatctgccagactccactttcttaactggagggcagggtggttgctcaaatattttgggctcagggctttggaaagatttcttgtcttgctgcatgctctgtggaaccaggctgagagcaggatttttgcatttagaatatcttagcagaactgggcaagatgaaaaccaatctttttgtagctaccaaaaagtggacatacttcagctttctgtcttctccctgctgacttgggtgtatttggtgtgcttgctctgtgctaggcccttcctgtctcttatctcactaaatcttgacaatatccccagagattggcatcattatactcattttacagatgaaactgtctcagaggggttacggaatttgcccaagacacacagctgagtggtgaagctggaattcagaaccaagttcggcttattagaaagtattcttatatactacatgtagaaatgaaacgcaacgtatgtgacagccattataatgtaaataataaaagtaacaggattttctccctgccctccgtaattcagtatacttgttgattatttgctgcttctggcaagctatgattgattgctgttctgtgggatatggagaagtttgaggaatttatgatacagctggggagaaaagacatattgatgcttgaccaggattaagccaccatatctcacaggtgtttagacaaaggagaaggcacctctgctaaggcacatcagggaaatctctagggaagatactgatttgacatagtactttctgggtatatagaattgtttcattttgtttgccgagtatgttaaaactgtttgcagggtgtgttaagatgatttgcagaagaatgttgcatatattattcgttttgatttggaaaaacaattaaaacaaggagagtcttattatttgccctatctttgggtaacttctgtactaacaaaactccggctcaccagccactagagttaaaattctcactaaagaaattgactaaatggaagagaatttatttctgatttcctttttaatgtaaacatatgtattgacacttttccttggaagaagtgtagtttctcttttagtagaaggaaatagaattatactctggcttaaattctattattataaacatacttctgtttttatcttgagataaggctttcctatatactgttgggagtctatagtgatatagtcattttctatattatttggccatcatttattcttttaaattcatttataattgtttttgcatgttttattgctaacatttaatagtgaccacccattaaagctattgcagtacctaagtatttataaatttttctgacatgttattgcttctggattataaactgggaaataattaagattcttgttcttgttgtaatgctgttatggtgatgatttagtatttccccaaacagtttatataatatggtctttttccacattggtatgtttctttatttgctggacagggtattttaatggttacatctaaatggaataaactcatagagctgttgatttgagaaaaccttctataatgccatattaatctatttagctcccagacctttcttagcagatcaaaggaatttcctggccactcccagaggtctgaccgccttttatctgttttaatgaaggtaattaaaattcctcagcttatgaaggtctggtcctggtcctaagtgaactagtccccagcagaatctgaaagaggactataagcaagccatttatttctaaatttttaaccttatatttctgtagatcctgattaaggtagttcctgcagtgtgagggcaaacttaggttgccagtattttagggaaatatgagttcttctttcataaactctgatgattattttgattcctgtatcattcatttgaaatgaacctgcaacactttgtgggtacataggaatgaagcaaatgcactctaaataattaaccagttgtgtcattgatttctactgataggtttatagcaaatgactttacacaaagttattaattaaatgctgtgttctgatgttgtctaaaaaatgtcatctggatgtccacagtttaaatcctcaacaaaatgttaaaagtcacagaaaaagtctttgacatagcatgacttaggatctccatattcatagttatttgttgagtaaatgtgctttgagcacttatcatgagccaaacactgggctaggtgttacagagacagtgctgaacaaagacctcgccaatatggtgcatattcccattttacaatctgtcagctcagccagtctcttaaaggccatcttttcctcaaacgagtttctgaaatgaaaatgaaaagagtcatttaaggatttaatctgagttctagtctataccctgaccacacaatgggcctcagggagaagaaggaacaagacaataccttactagagcaaaatgacttcccattatagaacatggtctggcactttcaagataaatgaagctgtaaagttaagttgtgcaattagtggacagagacaggtaatttgtgggcatggaggaggtttccaaatattcacagcaccaagtgatcaaaagctgtaagtagcatttgtgcacttttcttcatacattttacattaagaaaaaaaccatataggttgatattaagcagctaactgaaaatgaactgtccttaaaaagtaagtaaataaaaaacagcacttttcctgatgaatgaaggactgtgaaaaagctgttatgggcttagcctatgtagttcccagcattattttaaaaagatgaagaaaagaatgttgaagtctttgcattttcaatgcctaccaggtgcacctgccactcctgcatttctgggtttcacttttgtccattgctagctctcatttggtctgcaaatgtctgagtatctttcatgttccaggaactgtttgtgtgagatagatgcaatggtaaataagtcaaggtcgtcaccttttaggacctcatcctaccaacttaataggtgctagcagagactcgttgtgtgtctattataggataagtgagtgaaagtcctccttaggtaggtttcatcatctgcacttggatggaatgaatttatgaatgttcttagagacacttatagatctgagaaataaaaaacacataccaagaacttattgttgggatgaagaagagtaaataggggaattttttgggttcctcttctcctcatcctccttacaactcctcctgctgataagatatttagtcctatgattgacccagactgtcattttttggggcccttctctccatgcctgtggccaagccctgcctgggcttgtattaccagggatgactccacatgcttcttgcctgctattcacagaaggccctcttgtcttccgtgctcactgcgtggatggaacacccaggcaatgggacaccaggggtctgtatgtgctgcctgtgccagtgttctgagaagctccctgagactggtttggtgtaagggctgtcagtctgctccacaaacccagaataaattggattggaaaagtaggaaacctcatttagcttttgtgcctaaactttgtatacccaagcactgtttaccaaaaaagttctggatttggaagtagttaagtattcaaaacatattcaactatttatgaaaatgatgcttattattctatgtttatttctctcagcagggaagcccaaagagtaggggagatgaggagtaggttgtggaatcaacacccttcctcctgcctccaaaccacctgcactgcccaaggaggggccattcttttttgggagcccattatgtacttagctgtggatgagggtgtatgtgtgtcttatattcctgcttacattatggatagaagattgaaggtcacacttctgtgggtgtcctactgcacccaaaagggtattttacataaagcatgaataattgcaccttttcccccaaatgtcatatactttgatataacattttgtagagttaggagtcaggctttcatggggaagagggctgggttatgtccagttaatgggcaggcatgtagattatactttgcttttgataggtgagggactctttcaagtactattctacttcctctgtggttagtttttttctcccattcttctattctttttcatctttggggctgtacatcaggggaggagggtgctgcagtttgctattataatgggaaaaaatgagagagaaagcaaagagagtaggtaactgtactcagctttatttattttatccacacctcaagctcttattaggaaagggtgggttcttcttttctttttttttaggggggcggttttcttatagaataattactggtattctctggttgataagctaagagaaaagagagtcagggaaaagtactttactgtttttctatgttgtgttcattggttgtttttgtctgtctagtaccaaactttccaccaaccacataccctcttcacggttcccctccttccttctccaacagggaaaggcaggcaccagtggattcctctgtagtcaagacttaacataaccaggaattcttcctaaaggaagaagctatcaattagctaattatacttttcccatcccaaatttgttggacttctttgaagacaggatgatttaaatgagtggagaaggcttacctgggtggagggaagcagggagtaccaacgcatagagtgggaggaaggttggaaatatgagtgagagaaggtgttgatagtggaaggttgcagagaagttgtctgagaacttattcagagccagatggaggaattgttctactgattctcaagaagaattgagagttcttgcagcaattgttattatgtggttttgcaacttctctataatctcttataagagtagtttctcttagaagcctagtcagtatacctgaaactttaattccacttaccattataatgagaaaataaattgtcttattagattctgtgcaccaaggggcaagacctgaaaggaggatggaacggtgtgtagcggggatggcagttgatctgcaaaatcaggcatggaaattctgaactgttattggagagggaaaaggaacaagctacagttaactggtaaaactcagtcatattataggttaatcaaggccatagactgtgtgcttggtactatggaagataaagtgatatggaaagcatgatcagtgaccagtgggcttgtaatctaaatgtggagacacccagaccttagaaaataactatcccataggattatttttggcaaaatgtcaaatgaacaggtcatagataaatgatttaagaattcagaggaggtagagctcacttctacctggaagggtaagaataagcttttgttgacggggagaggctggaggtggaccttcaagggtgggtgggacagagatttgtcagcagacatgaatatggggtgctgggttgggcactttacacatcacagtgtggatacaacaccctggaaaaaccctatcactcccattttagagtaaggaagcataggctcagaaagtataaatatatgacccaaacttccttaaccattgacaggacaagttatagctgaatttcagacttaagccctctggctccaaacccatcctattccagtaccagtttgcctttatgaccttctatacacagaaatgctctgagaacaagaaagcaagtattttgcacccaggatggaaaccacatcattttggtaagggtacaggtcatttgggaaaaaatgagtgatgagtttaaacagtggtctaggtttggaaaaatagtctagaactattgaaggaatttcaggcagagaatgaggtcagccaaactatgttttagagagaagagctgcaaaaggaatgattttgtagaatatggcaaatgtttatttaacttgtagcattttaaactagattacttttagcttaggtctgcatctgaaaatcagtgatttacgtagtcaacctttatgaaagttttctttgattagtcaatctagaaaagcataggctttattttttttaatttttatttctcatgcttgtgttttgttgcattgcgtttatcctggatgccttaatgaaatggtgcgatatgacccagggctctcatctgtttaactttgctaatttgctccattttcaaatgagtttccttggctgcaggagcagcagcagagcatgaactctgctgaaaggaatttcagttacaccgctactgccacctctggggcccccggataattttcttatcgtctttttgccgtttgggaacaaagccacgttgttcacgactgaaatacagtttttaaatgtgcctcctaccgtgtttttatagaaagagagcctcttctcctggaaaataaaacaccattgattgaaccaacagcccttcgaaagggctttaattattgcattaattacaaacttcaggacaaaccagggcccagtagtagggagccattgagcagatttctgagcggctttaaagaaaatgttaaaagccttttagatctaagaggctgaaattgagagaaggaggtgggcatgtgggagacactaccttcttcaagttataagctttgcattaaaaaatatcctcttccctctctgatttgtgtttcctgggaaagctccaatgactcattgctccaaggcctcaacattttctaccctgacattgatgagagagaggaaagtggggaggtggtctaaatgtcatagagtagaacttctccaaaaaaataggtcactggggaaaaaagaaatactcttggaataatcctttaacatgatcatcttcaaaatgctcactttttattctgaagaaaaagaagaaagaaaaaaggcaagtaatttctttctctggcaaaacattcactgaggtgttttcattcaattactttgatggttggctgttgggaaaattatcaaaagtgaatatgggtttgggaactactagaagattctcaaagttgctttttatgatctctttcccagggaaaataaatcattaaatactgaggtggctagatgaaattgaatgctacatctcatggtttattcagaatgggctcttccatctgacatccttttgacaggttctaccacatgtggcatttctggcaggtatgagggtaggtttcacattctaaaatgaaactggcagtcacacgtttccctggtttaaaacattttagcacttattatgtgccaaatagtgctctaagctgtcaacatgttaactcatttaatccttacaacaattttgtgaggcaggaactattataactatttagcagataaggaaactgagccttagcaaggtcacagtggagagcaggctgtccggctccagtgtctacttaattctaaccgaatactctgggagacaaagacgttcgtctcaattcatatcaccttgaatattcattgccagttgatgattgttattcttaattccctgcaaagactcaaccagtcaaacaattaatcaaatactgatttaccaattttctgggcacaagattaggcattaggagatgagtaaagatcccattcctacattaggagttcccaatctaatacagaagatggataagcaaatagggtgccagaggttggagtttgtggctcagatttgggagggttcatttatcaattcattattttaacaaagtgtagtgctagtatatgccaagcactgtgagtgattcccccatcccctgctcctcagtggttgcagtctgatcaggggagatggataagcaagcagcatgttgcattttggtgtgataattgctgtaattatgggcaagtacatgcaggggtactacatttgtaaatgtaccaagggaggtaatggcctgttcaggaaactgcactgtgacttagcatggctggagggtccagtgaaagcacagagaaggtaagaggtgaggctgcagaaggccccagaaagggttgggagtcaaggacattgtctgccatttcagagactctggactccattaggacattgagaatgttacttggtacccagcagtaagagttccttttcatccaagctctcatgtcactttaattgaaaagtagaaaagcagaaagaaagagtatcctaaaattaagcaatgataagacactgcaaatttccgaagattggaaattgccacttttatgtagagcttatggctattttctcgctggagacagactgaaaaagtgaggtccatatctgtgtctatttctgggatattggctcagcaataaagatgttagaaaaaataaaatgatggggttaaaaatcaacacatgtcacattaatttctgattcttctattggaagaggatcacatttcaaggtcaaaagatggagcagtgagatttgtagagagaaaatttatgggtggatatttgaaaattttctataagtaagcattgagaacattacgaagctaccagattttgtaattttcaaaattacaaggaatgtagtggaattggataatggatggtggaacctcttattcttggatcattggtttagatagatcccagattggcaataatggaaatttatttcaattttatgtctgctcagtggctgaaatgaagtgggttaataggtgcagttttgctttttgtggaggaatgccctagtcacagaaacccctaaagcaaactggcctttatatccccccagatgtttttccaggatgggtagtaacagagagggatatctctttgtcttggatttcctttatattgtgtgtcaaaatggacagtgtacaaagagtactattcaaaagtgtgagactaatctcagtttattgtgaaattcaatggatcacaaagtactgtgtccccaaaccaaaacagatgattggaaaattgaagactagatatttggaattgcttgaatgctggaggatggtgtgggcaggggtggaggcctgggtttctggcatgtaaccctaaagtcctttttatctttagtcttgtattctacctgagtagtaggtattgtgaaaagtatgttttctatgagtttacagatacagttcctggcataatgtacagcatatagcaggaatcctgtaatcattgaaggagttaataaatgatatcatcagcatagaacagtttggctgctttatgtataactcaggctactacagattgggtatctcttatgggaaattcttaggaccagaagtgttttggattttggatttttgtggaatatttgcttatacataatgagatatagaggggacgtgatctgagtctaaacatgaagttcatttatgtttcatatacaacttatacgcatagcctgaaggtaattttacataatatttttctttttctgttttttgagacaaggtctcgctctgtcaccccaggctggagtgtagtggtgcggtcatggctcactgcagacttgaccttctgggcacaagcgatcctcccacctcagcctccctagtagatgggatgggtctacaggcctgcagcaccatgccaatgcccagctaatttttgtattctttttttttttgaaatggagtctttcccttttgcccaggctggagcacaatggagcaatcttggctcactgcaacctccacctcccaggttcaagcgattctcctgcctcagcctcccaagcagctgggattacaggcatgtgccaccatgcccggctaatttttgtatttttttgtagagatggggttttgccatgttgcccaggctggtctcgaactcctgggctcaagcaacccttccaccttggtctcccaaagttctgggattacagacatgagacactgcactcagccttatacaatatttttaataattttgtgcatgaaataaggtttgtgtacattgaaccatcagaaaaaaaaggattactgtctcagtctcccatgtggacagtctgtggttttttggcatcaccgtcactcctgactctgaatttatatgctactgataagctttgtgttcttacacttattcacgcataagtacttaacagtaaaaaatatgacatgcatatctggtgtgcacagaaaagatatatcacagatgaaggaggctgggagggccttttttcccttggggacattgaataaagcatgtgtgtgcacctgtgttttgattgcgactggtcacatgaggattgggtgtggaattttccacttgtggtgtcatgttggtgctcagaattttcagatggtggagtatctcaggtttcagattttcagatgagggatgctcaacccataaacccatatagagataaggagtcttggtacaacatgtgctttatagaaaggaaaattttaggtctcagttgtagacttagagaaattcaggactaagacatttctgtgcatttagttccttttcatttttattttcctaccaccttcccccagccagctttcatctttttctctcaaagctctgcaaatcattgaaaaaattttccatgttattttttaggacaaaaacttactaaaagtcatccatccagcactgagttcttactcacgggggtcaccactgctgtgttctagttcctttgcttttgttttgttcactggcccctcctctccaatccctgagctcctacactgcaggccttcctttttattttacgttttacactctcccaacctgactttatcctttcaatcaaagatcattaataaatcttgtattgccattacctcataaaataagtattccatttaatcacattatctatgtatctgaaatcaggaagataccgaaaggtggtaaacaggaaatgggaatattggcagaaatgtactactgtacagctgagaattgtcattctctttgtttttttttttgtcgaaaataaaccttctgacagagatgatcagagaaagggatcataagtggtttcatatgaatatcaagattggctcccattacattttggcactaggtgttaagtttttatctctctgatcctgataggtggtggtacttggtgggcagtgtcatgaaaaccaagagaaccagggccttatatttcttttattttaacttgggtttttattttttttctttgcaacttttatattatgttcaagggggtgcatatgcaggtttgttacttgggtaaattgcatgttgcaagggtttggtttacaaataatttcatcacccaggtaatcaacataataaccgataggtactttttcagttctcacccttctctcgccctcaatccacaaataggtcccagtgtctattgttcccatctttatatccaagtgtactgaatatttagctcccacttataagtgagaacatgtggtatttggttttctgttcctgtgttaattcacctaggattgtggcctccagctccatctgtgttgcttcaaaggccatgatctcattttttttaataactgtaaggaactcaaatcaacaaacaaaacataacttgagttttgagaggtgttttctaccagatacttccctttgaactttgtatgtgacttcctagagagaaagtgtgttgaggaagttcactattctattctgcagtgagagaagacgacaggctaccagggaaaaatagaagatcaaaacctttttatttatttatttttgtttgtttttaaagtatctgtttccatatgtatactattgtgcaaccaattagttggggatagcggatttttatgtagctggcaaacttatcaggcagaagagaattatcatgtatatttcagcagcaatttatgaacaggtttgtttctaaaggatgcacatgtattttgggtttcactcttagtttcactctgattaatttgcttaataaatcttccttcttaaagacagaggagaggcaaacacaagtcaagcttttgttttagccagtagatttataattaatgacttttgttgatttaagaagctttctgaacaattcttggaatgcagtggtggcatcatgaaaggagcaaagggaacattttcgtgggacataagtaagatttaggagagggaggagttcacagactatcattaattttacaggaggagaaaatcaatgtcagtaggaaaaaagatacgtacaaaagatgacttctggatttgaggaaccattctcaatagcagaaaatagagctgttctcaagacatatgttaggtctctcacaatctatcagcaataaaaaaagatagcaatatagagatgaaagaggaagagagaagaaggattaagatcagctgtcaaaatgttgcatacaaaatgtattgaatgtcactattataagaggtcttactgtaattaaatttcctgtctatttggatttgctcatcttaaagctttttcagttgtcagtgtgagaaatgtttcctatctaggtgttttttcctccctgttaagtatcagcacagtgtaattcaccatagttgggtagggtggtactgagaatgtttcctacctcagcaagcctaatgtatatgattgctttttgtgaagagttttttttccatttctaccattaacaaggtgttagacacttagcttggtagtagacaaaccattagatcaatattcccagaactagagagttctgatattggcaggcattatttattccattaaaaaatgtcatattcatttaacaaagatggaatgcagatagtttcaccgaagccatgagtgtgataaaggctatagacaaaagattcctgtgaagtgaccatctggaccagtttaggtgttaggatttctgaggttcttgaacaagagctgttcctgctagctcatgttttagaacccatgtacaggaaaattgaggttgtgtttaaaaaatatggcatgtagcacaggaaatatgtgttttcagagcaaatgataacttaatattggctgaataatttgtaagaatactgatttttttgtcatataacctatatattttcttaaggaagataggtttataaggaaaaattgcaataattaaactgagcataccaacaaggaaaaataatttaactattatgatgactcatttagttggcatcctcgagtaatgaggtgctctagattaattttcctgagagcagaaatatatccctttaaatgattaagcattttatcttcatcaatctttgaataatatatttccaagatatattttacattcctttgtgtcataaatatgctttacaatgtatagggctagaatcatagtttttttttttttttaagagtttaaagaaacactgggagatcttggaaaataatattaccacattggagtgcaacattcttgtctctgatatatgaggttttgattagatgatcatcaaaattccttctctttctaacattctctaaataaaaagtcgtttatgttttaaattgtagtatatataagaatcagctagggtctttgttaaacttgcagatactcagacatcatccctagaggttctgatttagtagatttggtgggagagaagagaatccgtatcataaataatcacctagagccattctgatgacctcatttagagaaacactgattctctttccactcttgtataacagacaccattactcttgctggccacgtggtccttgaaaagatcattgctgctttaccctcagtggcattgagttgtgaggggctgatgagactaataactatgctttgatagtctttgctttctgaacctttcctcagtattacctgtcactttgttaatggtagctactgaggaaaaccagatcatcaagcttattaaatcagatgccctgtacttgtacatttaataagtcattgagttctaatcttaggtctgggtagaggcaggggaaggactgtctattttctcctgtagtctaaagtgcatgcatttagcagtgatgattatattccctgtttggaggtcttttactcttttgtcatgttctggttgttttaagaaagtcaagttttctagaagcatgacgtcagaataagtggcacattactctataaatatcttaattttcatggtgagattcatagtcaggatggtctatgactttcaaatattaaaaatttaaatataccataaaattctcctttaaagtatactgttcaatgatttttagtaaaatctgtaaatttagagttgtatgaagccaacaccataatctaattttagaacatttccatcatcccccaaaagaaatcaggtaactgttcccactcctaaatccagtcaatcaataatttacttcttatctctatagatttaccttttctagacatttcatatgaatgagatcatacagtatatgcccttctgtgtctggtgtctttcagttagtgtaaagttattgaggttcattcatgttttagcatgaatcagattgccaaataatattctgttgtatgcagttactacattttatttatccatttaccagttaatggacatttggattgtttccactttttgactattatggctagtgtgttcaaatctttgtgcagacatacattttaattctacttgagtagttttacctaggagtagaacttctgggtcatatggtaaatctgtttcaaggtagcagtttcacatgttacagttctacccgcaacgtataagggtttcactttctctacatccttgccaatacttattattattattggatacaagtcccttattggatatatgattttcaaatactttcacctagtcagtgagttacctttttactttctgaatggtgtcctgtgaaacacagtatattttattttgatggatccccgtttatctttcatctatgcatctgggtactttttttttttttaaagaggaatctttaacccaatactcatgccttcttgaggcttactcaagatcttgtaagctttgtttagtatgaagtccctagtgatacctagcatatagcacctagtttaaacagattacagatgaatattcaaagtttttgacctgaatttactgtagtcaacagttaccctaaagccttaaagattaccaaagccatgatagactcagccaccatcatgcaatggctatgtccttcgtagcatcctttcttcacattcatctttgctttcagcatatgaaggggggaatgtaggtctttaatttaccttgtactgtggggtagcactatcctttccttactccattttcaggcccttggatgcaggacccttctctgaggtcccacagaggtggaggcccagcctgagcttttacaggttttagagtaagatgtcaggacagcagttcacactcagccacatcccattaaaagaaataaaaaagtggctgggcacagtggctcatgcctgtaatcccagcactttgggaggccgaggtggatggatcacttgaggtcaggagttcaagaccagcctggcccacatggtgaaaccccatctctattaaaaatacaaaattagctgggcgtggtggtggacacgtgtaatcccagctactcgggaggctgaggcaggagaatcacttgaacctggaggtggaggttgcagtgagctgagattgtgccattgcactccagcatgggtgacaaaagcaaaactccatctcaaaagaaaaaagttgctgctgtagagttttgtcataagaacatactggctgcagtgtccataggcaaagatgaagctttactgagggctgatatactcaatacttctgcccagtccacttgagtctgtctttgcctaaatactaaattgtttgaattctcctttagttttagattttccctactgaattgacatggagaaatgttatcaagtccaatttgcaagaatgctggatttccacttggagcttttgttttcttgggcctagaaggcatctcttgtttataaaaaaacactgggcatcattgtacatgagaaacttaaagacagtgcatatctggtagcagttgatatacagtgtattattcctaaatgtagtaataacaccttacaattggaaaaaaaatgagttatagatgaccaaatgcttccataaatatgatcacatttggtcctcccatctctgtgaagaattattattcctcttttacaggtgaagaaaatgacttgtcagaagtcatttatttccaaatataggacttctgataccaaattttgtgccttttctgtagtgccatgcttcctctccaaagcaatagttgaatttctgcaattttaagaaaatcatatatgtcgtgttatattagacccgtggctaatctataagcagtcatttatattttaaatgaaatccattaatgatatattcactttctagggcttatttccatctcaagcttccatttctgattgtaatgtgtaatgttgcatttcctgtgaaaggaattccaggctttggattgtaggtgggtaagattagtggtgggtcttagagagtcgggagatcctgagcatgggaacagccttttgcccgtaagtttatactgtgctcaaagatagtctgaatagttttaggctgcctggggtcccaaggagactttatgcctcccgatagtaaattttgggtccccaaagacccaacaatatttccatgcgatcatagcttgaccccaatttatggatgcttccttcctttcttctttaatccttgacaactttcttccccaagatttcctcgtgtcagggacccagaggccattcttactatgatctctttcttttccatttcattccctatggcttagaccatttaggtggggcagtggttctcacagtgtgaaccactcatcagcagcaacagcttgttaaaaatgcaaactcaggacccaccccatatctgcttaatcagaaaggcctgggaggttgaaccctccagtccgtgtttgatataccttccaggggttctggtgcatgcgcacatgtgagatccacttgtgcagtggttaagagcaaggattctggaatcagcagccaggtttcaaattttagctctgccatttggcagctaccacttcctgccatccatttacctatatgatctttggggaaattactttcctctctagactttaatttcctaatctgtaaacttgtggaataaaatatgaattacctacatgggaagttgtagaaatgaaataaggtaatgcatacaaagtgtctcacgtgatgtctggcactctgcaagcatccctgaatgggagctttcatggttgatatggactctgaccctagtcattgcctgcacagtgcttgatgaccttcccttgcttgtctctagcagcttggcatttaactactcaattctaaacctgaatgtttgccatgtgctccattttcagtagtatgaaaatgagactagttttcacactaaaatccctgtatgaaatatatttgaaattttgcttaggtcttgcttttgttttctgccacccagccagtttcctatctgggataggacatcgcttttgataataattcaatatttaaagcctttgtttaagaatgtgtcttaagacatgtttaaaagtctaaataaacattatatcctgtctcaatttatctaccacttaaaaaatttcaagtgttttttatctatctatgtctatctattgatatagaatctatgtagggatatagaatctatggattctaaatagattctatatagatatggataggtttgatatccctatctgtggcttttctcctataacatttttctaacttaattgtcagaatctgttctctagtagaaaatccaccgatgtcagaggatcacttgagtctgggaatttgaggctgcagtgagctgagatcatgccattgcactccagcctgagtgacagagagaccctgtctcaaaaagttcatcaacatacagtatacttccaacaaatccacagtaaaatttaatgtattggatcattttcagactcgcggcagccagtccttgggctatttctatgagtctttatgtaactttgactacaaattcgaagttgtcctcaaatccactagaactcctggttggataccattcaatcctggtgatttattttacttttatttgtcagttaggcctagtacatcccttgcatttatttttcctgaatttagcatatttagactgcttacttcagaagagaatttgttttcaaatattctctttggtaaaatatacctcagaagttggatttattccctttcctatcttttattcatctatgtactgcacttatttttataagttcatctgattcttcagctggctttctgccaatgataaattaaaaaaaaaaaactacacataaacgaaaccaacaaccagaaaacccttttaacttgttatttatttatttatttattagcaacctttaaactctttgaattatgtcatgaatttcctctgacttacaagctcacagggcagcattttctaatagtgttttgttttagcctgaaataaaaggttccatggtcaagttagcataggaaaggctacatacttattctatgcccctttatcccctagcctctgaaacagtttagtaattcataattcacagtagcatttgaaacactctgagatgtcctgcatagacaaaccagattaacttggtttgacctaatttcccccccaacataaacacttattaacaatctgtgaactagtgttccttagaccacctttgtgtccattgaatttagaagttttcttattctcatttggcatagcttaatgtttttagatgtgctttagttttttcctctttacctatttgtttctatttggtttcttcacttacgctttttccatatatatttttttgacaagtctgtgtgacccaatttaaacttttctgatgacatttactttgaattaaaaaagattttttgttcattacttatcttcctatattctatattgaaatgattattttaatatttaatgttatagcatattaatttattaaagtattaaatatttatattattaaatttattttaagttaaataatcaaataatattgatattaaatatttaaatatttatatttaaataatatttaattttaactttatattgatataaaattatttaaatattgataaggatattactttggtagtactggtggttataatgtttttaactgtctttcttattcactgaatatattcactgactatttcatggtaggtttttaagctttattgcttttattagggaataaatgactaaagttatatattaacatttacatttgtaagttaatcttcaccataggtaatttttgctttttaaaatttgttgcagtactctatatttccttgcgatacttactctctttgcacatgcttcttcttttgcatgaaggctcttgttccagatatccacatgtctgtttcctttcctccctcagttctcttttcacctgttgtcttctcaatgaggctcatttttgctgctacatttgtttttagatgtatttgtaaacatctagacaccctaccccaacactacctattccccttcttgacttcatttttattttttgtgttgatcaatatgtaagatactatgtatttcttgtattcattgtatttatttgttctttcttaatagaaagtaaacttcccaaaaacaaggattttcatctgttttgtcactgctttgtctctgctgtctagaacagtgggacatattttaggtgctcagtaaattttcaattggatgaataaatacaataatctcagaagatgtaaaaactgcattccataaaattcaaaatccattcatggtacaaaatcagtgaactatgattaaaaggtaaaaacattgagcaaacatgatatttattggtgaaacattgaaagtattcttttttaagattacaaacaagttaatacatctttaatcagcaagataacatttctatgcagcattattatataggaaattctagctaaaacaatacaataagaaaaagaagaattattagtattgaagaggaagaaacaatgctatccctagtcttagaggatattttgtctgcatagtaaccatcccaaaaaaatacagattaagtattagaatgaataaaagaggttatcaaatatgccacaaacaaaatcaatgtacaaaatcaattgcatttctgtactttgctacaaatatttggaaaaggtaacaaaataccatttatagtagtatacaaaatataaagtacctaggaaaaactcttagaaaaacaggaaaagacctgtgtggagaaaatgataaaacaaagatccttgagaaaacctaaatgagtggtaaaataaatcatagttctgagtagaaaaataccaatctacaaaagatatgattctcctaaaattgtttatttttattttttatttttttattattatactttaagttttagggtacatgtgcacaatgtgcaggttagttacatatgtatacatgtgccatgctggtgcgctgcacccactaactcgtcatctagcattaggtatatctcccaatgctatccctctcccctccccccaccccacaacagtccccagagtgtgatgttccccttcctgtgtccatgtgttctcattgttcaattcccacctatgagtgagattatgcagtgtttggttttctgttcttgcgatagtttactgagaatgatgacttccaatttcatccatgtccctacaaaggacatgaactcatcatttttatggctgcatagtattccatggtgtatatgtgccacattttcttaatccagtctatcattgttggacatttgggttggttccaagtctttgctattgtgaatagtgccacaacaaacatacgtgtgcatgtgtctttatagcagcatgatttatagtcctttgggtatatacccagtaatgggatggctgggtcaaatggtatttctagttctagatccctgaggaatcgccacactgacttccacaatggttgaactactttacagtcccaccaacagtgtaaaagtgttcctatttctccacatcctaaaattgttttagaaattttatggaataaaaatataaaaattcctgcacctttttactcaccatggaccatgcaagctcattcctgcccgcacacagaacagcgaacagggagttttgccctcccagatattaaaactgtgtactactataaaaatagcaattaacacagtatagtattgagtagaaaaagaaaataatagatgatttcagacagactagaggacccaggaagagacccacacatttatgtaaaattctttataaagacttgactcttaagacaggtaaatgcaataaatgctacatgacaattggttaactaagtggagaaaaaaaatggatactacctcacatcacacataaaaaaatcaattctggttgcaagacaaatctaggaaattgttagaaaaatatatataagaagatagctttatgacctcagataatgaagaattttaaaaacaagatacaaaaagcatgaaccatatgggaaaagatttagttttactacattactaccctatttatccttgttaaaatgttcagtagctccaaatacaatggaaaaaagactgggaccagtgtctcacaaaagagaaaacacaaatggctaaaactaatatgagaagatacacaacctcattagcaatcaaagaagcttacatttaaatgacaatgacatatcatgttccagccagtatattggagaagctaaaatgagtaatagcaagagctgcagaggtatgggagaaacagaacattgttagaaaggaagtaggttgttagaactaatttgcaaagtactttgactttatcttgacaagtttaagataccttaaatcccatcaattccattccaatgtatagactctggagagcttttatatttatatatgtttatatttattatatattatatataattatatgcattatatatattcacacacacacacaggagatgaccataatattcacagaatacttgcttggaaaattttagtagactacttttagagcaggtttaggatcacagcaatatagagcagaaaatagagttcccatatagccttcatccccacaaaagggcaaccttttcactatcgacatcccaaaacacaattgtgtatttgctgcaattaatgaacctatgctgctgcatcagtattacccaaagtccatagtttacattagggtctgctcttagtgctgtgcattctgtgagttttgacaaacctttaatgacatgtatctgtcattgtagattcctatagaagagtttcacttccctaaagagcctatgtgctctgcctattcatccctctcttcccactaaaacctggcaaccactaatcttttcaatgacttcatagttttgccttttccagaatgtcatatagtggcaatcatacagtaggtaaacttgtcatattggcttctttcgcttagtaatatgcaattaaggttcccaccagcactgaattcccatcagcaatgaatgagagtttctgttgctccacatcctcgccattatgtggtgttgtcaccgtttggattttcaccattccaatctgtagaatcattgttattaattggggggagagacaaccaacaaataaaggaaataactcagaggttcgttagcagaatgattttaaaaattgagggctgtgcatataataaagtgacataaaactatatacacacattgtactaaagtcgatttgctgttttgatattgtactgtaattaggtaagatgcaagcactggggaaactgggtggagggcacatgaagcttctccatactatttctccaactttccgtgtgcctataattttttttcaaaccaaaatgttaaaaaaaattcgagtgttgttttctcatagataaaatactgtccagctatggaagcaatgaaccacagataaaaaccacagggctacatctcacaaacgttatatggaataaaaaaatgcagtcgaataaaaacagatgcagtataatgctcaaaacatacaagctaaatgatatattactttgggatacaactgtgataaaactcaagaaaaacaagtgaatgataagaaacagaattggtgataatgcttatctcaggggaacccccacgcttttgtgagttttacatgcaggagactatcaggtcctcatagtgaatatcggagaataattcagggggattggaaaaggaacattttgaaatataccagagcattctgtgtattcttattaactaacccgccctcgggagaaacgatcttcctagagtctaacctgctgaggttttattagagcctaacatacctgggctaagagaaaggaaggaggtttcatacaaaatgaagcgttctcttaccacatgatccagaaatcacactccttagtatttctccaaatgagttgaaatgtccacacaaaacatgcacatggatgtttatagcagttttatttatgattgtcaaaacttggatgcaaccaagatgttcattagtaggtgcatagagaaaaaaattgtggtacacctagacaatggaatactattcagtgctatcagtgctaagaagaaatgagccatcacgtcatgaaaagacacaaaagaatcttaagtgcatatcattaagcgaaagaagccaatctgcaaaggttacctaccgtatgattgcgattatgtgatattctggaaaaggcaaaactatggagtcgttaaatagattagtggtttagtggggagggaagcgtgagtaggcagagcatgtaggatcttcagggcggtgaaactattttttatgattctgaaatgatggatgcatgtcattatacatttgtcaacacctataaaatgtacagccctgagagtgaatcctaatatgagctatggactttgggtgataataatgcttcagtgtaggttcatttattgcaacaaaggtaccactgtgctgggggatgaccatcgtgagggaagctgtgcatgtgggtggggcaggggctatatgggaactctcactactttctgttctatgttgctgtgaacctgaaactgctctaaagtataaagtttaaaaatttaaaaaactctgatctttagtttagcattttacaatctattttattgaaaggaacaaataaaagttaggattaagagaattaaacatttttcatagagcatataaatatagagcatgtaagagaagacttgattctcatttcagttctgatctgtctttaactttggcttagctggttttagctgatggtttttgaaggatggtccccagaccagcagcatcaataccaactggatatttgttagaaatgtaaattctcagacctcaccccagacctattgaatcagaaactctgggagagggactgctatggcttgaatgtttgtgttccctacaaaattcatgttgaagcttgatctccaatgtaacagtattaagaggtggggcatttaggaggcaatgattaggtagtgaggtctctgacctcatgaatgggactagcaccttatgaaaaggctggaaggaactacgttggcctctttggcccatcaatctcttctgccatgtgaaaacatagcatcaaggtgccatcttggaaacagcactcgtcagacattaattctgctgggaccttgatcttggacctcgcagcttccagaactgcgagaaatacatttctgttgttattattacaaagtgtcaggtattttgttatgcagaaggaacagactaatacagggactcagcagtttattttagcacaaggcttccaggtgattctgatgtgcatagacttttgagaaccactattactttcaaccttttcatctataaaattataaataacactagatcactttttttcaacgtgtgatgtatatattactgatcatgtgcaggacagttttaggtggcataaataagagcattttaagttttaccagctctgtatttattttaaagtttgttagaaaaatataaatagcataccaaatctacaagttcactggtgtttttgcctcatatatggctaagttaaaaaaaaaagaaaacaaaaagagaatcaatggaatcaatttgaacttgatataaatagaaatagccaaaatagtaaggtgataggagaatatcacaaggtgcatggagtaatttctcaaattttgaggccttagtaaccctgcactggattaatctcctacgtattttcattctaaaactatgagatttcatatgctcgtttttcttacagatttgcctccttaattttctttttaaaattcaagctcacatattaaaaatgtagtcgatgctgtttgagcttggaggggaaatggcctattagtgtgcttttgtactgggggatacttatctgagattcatatttaaccatggttaatggacatggggataattcacatgcaaatcatcaaagttaaatatattaagaagaaatctgtcctgaaaacaccatttaattttagaagcattttcttcttttcactacttgaagtatttatagtggaataggcagatgtttttataaaaaggaaatgaaacgacatttggggacagtaataaacatattttggttaattagggatttatactttgtaaaagttttcacattataaatagctaaaacatagctggcctttttaagtggcagtttaaacagctttattgagatataatttacattgtcatagagtccatctacataaagtgtacaatttagtggttttgtgtattcacagagctatgcaaccatgatcatgagcaattttaggacatgttcattatcccaaaaagaaaccccatgttcattatcagttactccccatcccccatgtagttccaaccctaggcaactacttacgtactttttatttctatggtttttctcattctggagattacatagaaatggaatcatatatgaagtggccttttgtgactggcttctttgacttagcatgttttcaagattcatccatgttgtagtgtgtgtgtgtcagtattttattcttgaataatattccatggtattgatatatcatgttggtctatccattcttcagttaatgaacatttgggttgcttttactttttgctatataaataatggtactatgaacattcatatacaagtttttgtgtgaacatatgtttttatttctcttaggtgtatacctaggagtggaattgctgggtaacaatacttaatacttgatggtaactatatttaataattcaagaaattggatataaagcactcttattcaaagtaaaattgcgattttatttaaaactaactacatttctgttttaataaggtatgaattttgtttgtcaaggattttacataaaatctgtctccaaaatggtgtttggcaaaaatcattattaaaatacatgtttttgaacacagcagcttacagactgctattctacatcacagtttatcatcatttatcaaaattgtcatgtcctctgtgacatgtttctttttctgaatattttattgtcacatgtgtcattaagcatttagaaaaaaaatggcctggaatcttcttcctgaactgatgaaattcatgatttttgtgtatagacatttacaaataaattatatgttgttaagaaactaatggtagttttttttcttttaaaattctcacttcaacatcaataaaaaatgtttctgaaatggaaacataccattttgatgtctaactgcatctgacacttttaagttttgctgtcctattattaatattttaaagttttaggaagggctactttttatataatgagattttatattccataaattattatttgactttgttttactttgtcacaatgcttcttcaaagcttttttgccaaattggctacctttagattcctttttaggaaaggtcttcaggatggtcttttttgttgtttttgtttttgtttttgttttttgagacggagtttctctctgtggcccaggctgaagtgtagtggtgcaatttctgctcactgcaacctccgcttcccaggtttgagtgcttcttgcgcctcagccttctgagtagctgggactacaggcgcccaccactacacctggctatttttttgtatttttagtagagatagggcttcaccatgttggccagactggtctctaactcctgacctcaaaggatctgccagcctcggcctcccaaagtgctgggattacaggtgtgagcctctgtgcccggcccaggatgctcccttttaatagctacttaggaaattaggttttggtaccttgttgttagaagagaatattcctgaaaaaaggaaacaactaaatgcatcgactatctggggtagtagaaagagaagcgacagcacagagaaaagatgccccttagggaggagaaagaaacaaatatcaattagacttgaacgaactaggtttctttattgatgaagaaagttaagccacactttaactttccttgccacactaaaagcaaacaaacaaaccccaaagaatagtcaagcagctgagacattcagtagccttgtaggcaaaacaagacatattcttattgttggagtatagttgtgtaaggcctgtagcccctttcttttgactaatttattccttttggaatgaaaatatttactcaatgcctgtacctgatctgcagactgatcagctgaaatcatccttgattttatttctgatagggagaacctgtcctgcacttaccatggtagagtagtgggtgtttataatgaagatgtaaaactttatagtttggatcatgtgggaggtagactctgatacagggcttagagtgtttattagggagtgctgttggaaacaacacaatggaagagaaaagaatcaggatcagacagatggaagagtcaaggtgtttctttggccaacaacatggaagctttagaactgaaatggttaatcagtttagtgccatgtttggccaaagtggccaggtctttgtaaaccacctccattagtaaatggatgcggctgtcacctcccacccaccagagcatgaccttaggtcaggcgttctctgcagctcagactgttccagcccctaaaggggcttacagctgggattgtcctctgacaacactccctacatctgggccaagaagttcttccttgaggattggtcttgatggtgtttctcctatgtctgctgcactacatcagtcattgtccccttaaccttcacaaaagcttttgaaaatatttatattttttgtttataaaagtggtacaattagacaccaatctgtattcaacagggcaatggttaaatccatgactttggagactatgtgtgctcttgtttgaatgtttctatctcccccagatttatatgttgaaacctgatctccaaagtgatggtattaagaggtaggacctttggaagatgattattagatcatgagggtaaggctctcatgattggattagtgcccttatataaaagggccaacggagcttgtttgtcccttccaggacatgcgaaacgcagtgagaaggaaccatctgtgaggaagtgggccctcactcaatctgctggtaccttgatcttggacctctcagtctccagagccatgagaattgaatttctgctgtttgtaagctacccgtcaacgatattgtcctagatccgcccaaatggacaaagacaatttagaattaacataatgaggaaatctgtgtgtactgatgagaaaatatgtccatcatgtcatagactaaaaaaaccagtttgccgactatacacatatatacactatgattatatttttatttacaaaagctatacaagtatgtaaaatacacaggtacgtgtagattcactaaagcttttaccttctgaagactgggttgggggtaaacaagaagagagaatgatagttttcaatttttgttttgtatgctcagtttatatgttcatttttctgttgctgatgtaacaaattatcacacatttggcttaaagcaacacaaattgtttatctcacagttctggaggtcaaaagtcaaaagtctgtcttactgggctaaaatcaaggtgtcaggagggctgtcttcccttctggaggttcaggggacaatctgttttcctgccttttccagattctagaggctgccttcattccttgacttgtgacttcttcctccatcttaaaagccagcagactcacatcttcaaatctctatctaactctctcttccgcctccatcttccacttcaagaatccttgtaatttcatggggcccacccagataatccaggataatttccttgttttaaggtcacatgattaacaatctaaattccatatgcacctttcttaccacttgccatgtaacataacacattcataggttctagggctttggatgtgaccatgtttggtggggtgttattctgagtactacactaggtaagtgaaactacagctttctcacaacctatgtgctagctgttcatgcttcctgttcagataataccaggtaaatgagagaagagaaacatccgtgggtaaacaattataatttagtacattattattctttaatttctatagtatttataataaagttcaataagaatttatctatgaggaagtggcttttctaaacaagtgtaaagcccccttgtttggaaaaatgtcagagagactgcatactttttcttcttgcccgcttttcccatgctggcctctgttgcagctcttctgaaatgtaatcattgctttatttctttatttatctctttcctaattttcttggaggttctttaagatgggggctatatactttaacttaccaacctattcaatgaatattcattaagtacctattatggctaactatttttctgaacatttgggatatataaattgataaaaaccaataaaaatttcacttctttaatggaggaaagacatcctatatagagggtgatgaatggaaataaactagaacaggtcaagaagaatcacaagtgccaggtttagggattgtttgtaactttaaataggttattagaataggccccattaggatggtgatatttgagtaaaggctttgatgtggtttgggtgtgtccccatccaaatctcatcttgaattgtagttcccataatccccacgtgtcgtgggagggaccctgtgggaggtaattgaatcatgggggttttacctccatgcttttctcttgataatgagtgagttcttgagatctgatagttttctaaggggcttttcctccttttactccacacttctccttcctgctgccatgtgaataatgatgtgtttgcttccccttccaccataattgtaagtttcctgaagcctccctagccatgctgaactgtgagtcatttataaatttcctctataaattacccagtcttgggtatttcttcatagcagcatgagaatggactaatacaggcttggaggagtttaaggagttagtcatggggtgtcagagtacgcttcattaggaagatgctatttgagtaaagactttgaggacttcaaggagttagtcatgtgggcaactacacaactgcattggaggcagagggaacatttactctaaagtccttaaggcaggaaaattccaagactgatcaagtaacagcaggagagcgtgtgcagacgccttgggccaagatgttgaatacatactgaagggagccaagggtgggaggtgatccgagagagtgatttttctggtgtggatcagggtggtagcaatgaacgcgatgtaaactcatcagattgtggatgcgctatacttggaagatagggcaagtaaggtttgtggacaggttggttgtgggatatgacagaaagaggttccaaggatgatttcaaggcttatagtttctctaattggaaggaggaagttgccatcaactgaaataaggaaggctatgatgagcaggtttggtagagaagatcaagagtttgtgttgggcctgttataaagttgagattctataagacttccaagggtagatggtgagaagacaatctccagatatatgaatctggagtttaggaaagaggtctggaatatgtgtaaatatgggagccatcagcacataatagatgctgagtgaacgaagagactgcctgagattatcaaatgaggcatagatggcttgagaatgagactgaggttggagtcctgggtcactctagcagagattagggtaagaagggaaaccaaccaaagagagtaagctggagccctctgcaccctttttgacagcagtaggtagtagatgtttatttagtggataaatgcccaaagaggaggtaaagtagcaaatgacaaaggggaattttatctgtctatgtagaataaattaaaaggtgaaaaacagaatcaactgtatttatctcatcagtgaatgggtaggaagcaagtgatggaaattaacataaaagtagatctgaggccgggcgcggtggctcacgcctgtaatcccagcactttgggaggctgaggcgggcggatctcgaggtcaggagttcgagaccacggtgaaaccccgtctctactaaaaatacaaaaaattagctgggcgcagtggcgggcaactgtagtcccagctactcgggaggctgaggcgggagaacggcatgaacccgggaggcggagcttgcagtgagccgagattgtgccactgcactccagcctgggtgacagagtgagactctgtctcaaaaaaaaaaaaaaaaaaaaaaaaaaagatctgttcctttttactctataaatatatttgtttataaaaataaccgttaattttaataagttaaagtgtttttttcttatgcaattacttctttttaatcttcatgatgcttaatgtgctggtgtggctaattctttgaaaaagtatgtaaaaaaatcccttctctacagagatgaatctagttcttcagattggttattcctatactttttatttgtttttgtttttgtttcagagacagggtcttgctctgttgccctggctggggtgtaatcacagctcactgcagtctcgacctcctgggctcaaggaatcctcctgcctcagtctcctgaatagctgggactacaggggcacactaccacactcagctaatttatttattttttgaagagatgaggtcttgctatgttgcccaggctggtctcgaacttctgggctcaagcaatccccctgcttaggcatcccaaattgttgggattacaggtgtgagccacccatgcttgaccatgtgaatatgaatatactggagaatagcaacactaagtagttgaaactcattttagaaattaccccatgaacatatctaaattcttcataatgagtcatagaagaatttctaaagtcaacttggtaaaatgtactgatgattttcattgaaaaagcatgattttgctttcatatatttaataatttgtagaactttcaactttcactgtggtcttaactggtattaaaggtgatttggaaattgtattgagcatgtatcttgctatagtataaaagaagtagacattttccttaagaactttatattctaggttaaacagttaaaacacttatataaatatacatataaacagtttagttgagaaaatataagatgatgtaattgcaggtctgtttgactcccacctatctcttttgagagaagaatttataaaagaatagactgaaaaagtggcaataactataaacttgcattttgacaggaagaagaatagaaaaggaagcagaatcagctgccttgatatggatacaagttctacaaataggacagccactatgcttgaatagtagtagttcacatacttcacgaagtaaattaaatgtgattatattgggcctgacctgttggtgagaagtggatgtctcagcgtggggaggtgtgtaagcttgctcaggaccaaaaagagccctaggtagtgaaatctttgtgaggggttggaacctgaataggaaatagcatttaacaatgctcatcttaaaaccgaaaacctcagtttttttatgagtatgttaagaatctctgaagatacaacctgggttggacgattacccaagatctgttacatatttaacatcagggaagttatgcaaagcttattattgtttcttgtgtttattttgggtgctgaccttcagaaaggccttagctaatctccaggtcaaagcctatagtgaccacccttgctgccgctgcatgccacacctccctctctgtgctatcttgctgcatttagggactttgttgtcatagttcctctcttactgcaaagggattccaaagctcttgaaaaataggaagtagctcatccttttctatgggctgaggggagcagtccttgatttacgataagaaaattctataatctttggacctttgatagaggtgacaaatacagagatctttcttggaatataatttgtccaaaactattttgagaaagcacacaaggcattaacatttacatttccaattaaagcatagggaaactgtttacaacaaggggacagaagttgatgctgttgtttattgtgttatatgctggttatagaccctcgttttacagttatttctctaaaatgcagtaaaaaaaaaaaagaatgcctagcaacatagcaacctctatgaaatgaggcatatgctgtttctaagactcacaatatgtttttctgaactgtttgctcataaacatgtttattgtaggtgctgcttgggcagggacggctttcctgtagaaatcctctcttgaatacactaggttctggttcctcttgtggaagaatgaagctctttttgactgccttggaaaatttgatactttcaggtatttatgacataatcaatggctgatatgtgtcttcaggatttatgactgtcctgtcataaattgccgtagtttcagagtgcatacaacatcactgtctttttattactgttattattggagacaggctgtcactgtgttgcccaggctggagggcagtggcgaggtcttggcttattgtaacctcctccttgccagctcaagccatcctcccaccttagactctcgagtaggtgggactataggagtgtgccaccatgccttgctaattttttaaaaaacatttttgtagaaatgaggttttaccatgttgcccaggctggtctcgaactcctgagctcaagggacccacccacctcagcctcctaaagtactgggattacaggtgtaaaccattgtgcccagcccactctgtcttttgaggtggtgggaaggtgagatgtagtgacacagatattctgtgtaccatagtgataccttatttatgaatcatcttgctctctctcttgaagtctctctatgctagaaacatcatctgatgtggtattcgacacgggttcaccttctggttttgtcactaaatgctttatgactttgatctcagcccttctctgtgtctagagaattgttaaattactaaattaaaatgaatttttgagagtcttttgatgtcacaaaatgtaatagctgctgagtgcccaagtatatatcaatttttctttagtgaagaagatgcagaagtggtaaaggagaggctgcttttggagagggcagagtgagaggagatggaagtttggaaatatgtcttataaggaaggccaatgaggaggcaatcattctgtaacatgtacttgtgatctagtaaagcttgtgttttgtatagaaggctatgtaggcttttatgactgggaacgtgtgaaaataatgacctagagccaatggggcatagggacatttgcggcatctaacccaggtctttttcattcccaggctagggggctacaattctcttctgaaagttacttggcatgatcatcttgctgttcttaaagcaaaatagcccaaattttgttgaagaaatgttttagagaaatgattgcctcatatttctaacaccactcttggttatttgtttactaaatagctttttattgggggaaaagtgtatggaaatttaagttggggaaattacttgggagaacttcttaatgtattagtctgttcttgcactgctataaagaattacttgaaactgagtaatttacgaagcaaagaggtttaattgactcacagttctgcaggctgtacaggaagcatggttggggagccctcaggaaacttacaagcatggcagaaggatgaagaggaagcaagcaccttcttcacattggcagagcaggaggaagagagtaaaaggagaagtgctacacacttttatttatttatttttttgaggcagagtctcactctgtcacccaggctggagtgcagtggtgcgattttggctcgctgcaccctctgcctctcaggttcaagtgattcttatgcctcagcctcccgagtaggtgggattagaggcatgcaccaccacgctaggctactgtttatatttttagtaaatacggggttttgccctgttggcgaggctgatctcaaactcctggccttaagtgatctgcctgcagtggcctcccaaagtgctgggattgcaagcgtgagccaccatgctcggcctacacacttttaaatcttttaaataaccagatctcatgagaactcactcactatcacaagaacaacaagggggaaatccacttccatgacccaatcacttcccaccagatccctgtcccaacattggggattacaattcaacatgagatttgggtagggacacagagccaaaccatattactgaggaacaacttaatgtagatagtttctgtgtatgtgtgagaataaagttttcttataaaccattctattttttaagttcaactattttatcttccttaaagataggggggttgaaagttgattttatagtttgagctcttgttatttttcaaccattagccaataaatataagtggcaattatttaagaagaataacataataatcaaatatgagaaatataagaagcttagaattgtggagttggaagggacaagtcacctcaatttatagtcagcatttatctaattgttctgccccccttaactgtaaaatggcaaaagtaatacttgatccataaatttcttttaaggattaaaagataatggattaaaagataatgtatacattcaaaaatattttttaagtgttttgtttgtttggtttgttttttcaagacaaagtcttactctgtcgcccaggctggagtgcagtggtgctatcttggctcactgcaacctccgcctcactggttcaagcattctcctccctcagcctcccaagtagctgggattacaggcatgtgccatcatgtccagctaatttttgcatttttaatagagacagggtttcaccatgttggccaggctggtctcgaactcctgacgtcaagtgatctgcctgccttggtctcccaaagtgctgggattacaggcgtgagccacagcacttggtctattgagtgtttagtatgtgccaaggcatatgctggttcagaggatatatctgtgtactagaaagaagatcctggctttactaactaggagggaaaaaaactttacccggtgatgacaaaggtgataagtacttccacagtgctcactgggacaaagtgtcagaccttacacagtacctgatactaggggagaaagagggatggacctgatgtgtcttgggtgtaaagtatacccattatataatcctaacagcaattctgtaaacctggtcttattttccttccttttacagatgagcaaacttgtgttcttgtaggtctgtgtcaagtaatgtttgttaaataagttaatgtgtaaatggaaacctgagcagttgtgcaacatgcccaaattcttcagcaagttagtgacagctgggaccagagctgtttctgacttcagcccaggggtcctttcattattctacactgcctctcagagtgtgcataggtgtgtgtgtgtatgcatgggagataggaaagttgcagtcttatatatgctacacttatcaatataaaaattatttcacaaaacacaaataatagtgaagtcagggctcctagtttaatccattttaattcctatcactagttacaggtatatttaattatccagatacgttgactttgtgctgtggatttagtgtactaaataacaggatccaaatctgtgaagttttctttttctggaaaactactggctctgaagcaatttaagccagaattcaaggccattcatccaaaatttaaggtgttctgaaatagaaggtgtatatatcactttacttaatgtgtgggttgtgtgggagacttttctttgcaaattgaatcattggagaccaatgatcctataactgcatttgaaatccttcagctggcaaacctttggtagttttaatttctttctcaaagaaaacatctgttataggtgtctgtagtctagttgtgtgtgggctaccatttcaattagtaaagctataatgacagtcttgggattttgtagaaaccctagtaatagatagaagtgaacatttctaatcctttattatgatcccgttatcaatttcaagtcagtttcttccctatgccatctatccaccaactcccagctgtcttgaaagaacatatataatatttttctaactttagggaatttcttttaagtttgagggcctctttctttttgctaggaagggaagccgggtcaggaaagcagaggagttagttttggagggccctccttttgtgcatcatttagttgcagacctaagcaatgtctttaatcccaaggaaatgatacaacactcctggagtcttccacggttttcagaaggtgagtattcactaacagtacctaactctgtcccttctgtaatttatgtggactctaaacattgctgtaaagtactgctggagaaatacaagacttgtacatttttcttttcttttcttctttccttccttccttccttctctttctctctttctttcttttttttttttgatggagtttcactctttgttgcccaggctggagtacagtggcacttaaaagtcaacctgaatcgcatttttctccagtctgcaatagtttgcccaaataattacagttttaagtcttttaaatggttactagtccttccagcacagaaaggtgatgcagccccaaataatgtgtatgtcggtactgtcactacagtgctttgggtcgaccaatctcatcctgacttctgatctggagtctactgtcatagaaaggtataatatgcttataatttttctcccccaatatttctttgcttctctgtggcagtatttctcccccaaaacacttagagatgtttgattttatccttgcagctgttataaggcagacaagctcgagctgacacacacagtttctctcatgacaaggaccaattgtgatttatgaccatttacaggatgctagtgatgtggggaagggtgtgtttttagctagcaaggctatgtcctttcacttggaaataaacaacatgttaaaaatatgtagcagggttaaaaagaggaagcttcactgtaattttcgtttagtgaagagcccttaggctaactttctataatgttcagctaatgtgtttatatcttcaaatcatcttaacaaatatttattgactgcctgcttcttgcaaggtgttatgctggctgaaatgaaagttttcatgaaaattctaatgtatagaattaggaagttagaaagcggggttattagcatgggtctttgtctgctttagttgaatagaacctgttatgaagcaatacattttcctccaaaaatttggcttctttagcaagcagcatatcaactaaagatgaaagaaagaagtggaaacatttattcacttgtaatgttaatataaatctttgttttcatcagaaattcctgaaaagctagattataatatgttacagtacaaccttgggtttggcttttagcaccaaggttaaacaaagatttatgaacacaaaagatgctgtgaaagctcagattcctgctaaaccttgaatgtcctatagtcctctaaatggtcctaaatgtggaaaaatcagtcttctcattggttaggacccactgacttccgtcattgtaattactgtgatataacctgtagggtatgagtgattaaataatttaatatcactgggagagttacttattatgtgttttatttgtatatttgcaagcagttcttcatttctcatgacagttcttgcattcatcatttactaaaatggggttctgagttaataacatttttttcctcattataaaaattctcagaacaagtcaagatctaattagacatcttcaatttattaaatcagacctctttacagagcccttttagaagcccaggtaacacttgttgttttaaatcactggcccaacatagtcacatgaatataccttgatgcaaagaagacggtgaagatgtaattttttagcctttgcatattaaaaaaaatcagaattctgatagtaagaaaaacatattgtttagttgcccaagttgtgtctttttctccacctctgatttcttcccaatactttgatgaagtactctgatgaagtactcccaatactctggcgattttctttttcttacccactataaagtgtggtgtttgcacttcatgcctgagtctttctttctgagaagaggctcctgcaagtctttggcagctttcaactacattaattttacaggtccatccttgaagcaaaactttaaaaaggtattttatgcttttttccttcctttttttaaaaaaaaaatttttcaccttttaattgtcagttctaattatctgtgcaaactgattcaggcagaaacatacaattctgagagaaaaagggaccctgggactgacaacctaggtttactgagtgggagaggcagaggtgcttcccaaataaaaactgtggctgttaccagaagaagggaacagggatgctggaaaaagaaaggacagacatccagttctggaaggtttatttggcttttattcataaaaatacgaaaacctttccttggttttctgctcttaatcttcctttaaatacatcaactagacatagtcgatataggtggttcttgtaagataaaacctccttggccccatgcaggtactctcctgatatttatacacagaattgcccatgtctcttaaaaaagagaacatctgatttgcctttaagaaaaatgtgcaggatggggtgggaatgagggtgggtgagggctttacatttcatgcagttgcagactttttggaggcagcttttactctctgggtcatattttaattcctgatcctgaagtggaggggaatcctgatgttagtgtctgggtggtattcttgatagacttttagttgaataagtaaggaaggatgcttacatgaacaaaccttattcagtgtcccagtttctgagcagcccaaggcaccaaagcctaacctaggatgaggatggtttgtgtggagctggtgaaactacagctcccgatctcatccaagattgttgttttccatttgctgctgaacagctgtttgtttggctttccagcggcatgaatatgcccacataatcacaaactcctagatattgaggcatcttaatgagaacatagcctgattttggaaggaatggaatgaaggaggccaagtgaattgcatcagggtgcctggtagaaaaactggcattagaacctcgattctatgctcactgtccgtgctctgctccagtacatgaaatttgtcagagaaaatgagatgaagcaccatggtttcctatgccctccctgtttgttcctggtacttaaccaacctaaaatctactcatggatctgtcaggttttagatttagtaacaggctcattgactatggaaataattgggtgggggctgaggtctttatggtagattcaagtaactagagcaagagtagatgggttattgtggtagaatgagggacatttgctagtttaaatcacatttctgcagtttgtggttggacttggagcttctttttctctgtagcttagtagcagatgcgcttttcgctgctggagcaaaactacctacagtagtgtgaatcagcaagtagggagtattattagtcatgtgaattcagatacttcctattgccaaaggcttgatatattcatatcttacattttatcttctctgtgacgattcattacatgtagtgagagcatatacttagtcttctgtgtggctcaactgggggcacatttggtctagtccaagtaattatatgtaacgtaaaattacatacagcacagtcatcaaagaagctgtccttccttcccctatcactaagatctagggtgactctggagtgccactgtgtgaacatttctcactcttgtgagcatgtttctaaatcccaaatcaatctgacaaaggattttctgtgaatttcttgttaatttcttgacataaaagctcttatgaacatacatattccgaacttaattctttgtttgagtcaaaatcatttttattcaagagggaacaattatattaatctagatttgcctggtaaatccataacatacagacctgaagttcaagcagaacccgaggtaatgtgagccctgggtaaggtatagtaaggatggagaggtaggtaaagaaaggcgagaatgattcatttattgagaaagatgagcaaggtggtcaaatagatttgcttctcaacaaagcgtgtagtttaagcacttagttttggtttcttttgaagctgccttccctttttcccatctctctattccaacataacagaaaaagaaggaaaaaaaatcaatacaaaacaaccatttacttatttcccagagtaatgcttctcaaactttagcaatgtgcatgcaaatcacctggcaatcttgtaaagtgcagattctgattcagtagtggtcaggcagtgattctcaaagagtgttccttggagcagccttgttggaacaactgtgagcttattagaactgtaaatttatgagccccacctaacctattgagttacaattttattagatgggcccaaaaagtgttttaggaagcttaccaggtgattcttattcacctgaaagtttgagaatcactgacatagaggagattctctggagtttttctcaggactctggtattttctactgtcactgggcttacagtatacagttgatctttagcagtggaaacagttggacagagatctttatttaggctcctgaatggctgtcggcatcttgaaagttgactggcttcattaaagtctctatttcttggtcctttgacatctattatgataaccctgatactttctaaagcagacatgccacttcatggaatcacgcacctcatggaattccatgcacttcatggattcatgcacgttagcacagctagacacctttatgtggcaattgggtaatacttactttaaaagatagaataaaggaaaaactacctaaaatttcccataacatttttttttttttgcagacttttcaggggtatggatactatatgggctttatatcttcatatcagcttagtcctagttaattgttattttcaatcatattaatggccattggtcattgctagccagtatctatgactggctggttctaatggctacaagcatgcttagcagtgccctcatgaatgttgctattattgttgaaggaggaaaacattttaataattggaattggattttctcagtattcagtattgcaaaaggtggatgtaacttcttatgatgtctcaacagctattactttattttttaatttatttttaaaaatcttattgtcacaccccatgattctgcaacagctataattttaatttctgaaagttttgatgatttcctccaaggctatagctggagaaatgtacattgtctattattagtaacatttctcaaattgtttacaaggcctgcagtatagatgggctgagactgtgtttatgctttttcattgagaaattttggtcttgcagaaggaatccatttgttctgtgaatctctataaagcaaagagaagagttcaaaatttataagggagcccaacaagtgttccaaaaaaggctatttaggcacaacatttaggtgcttatctagtatgttgtttctatcaatacatagcttaaatataaatagatctaagaaccttagttaagacgaaagggtatagcataccatgctataaaatctgtcatacagaatacacataaagtgtctgctgtaattttgtaatctttccaaaagcaatatactgtgtctacagccctcatttacaacttatagaaatttactcattttatgcagaaaattggaaaggagcagatgtttattcctaagctagaattttgaaggccaacaattaaaataaacatgtctctgccaaaacttgaactaaattgaaaaatttagcatataaattaaagctcacttaaaactaaatttatcaaggaaatacatttgttttgcattgctggtttcaattattctgaaaggacttttatttttatggaacactgaagatttttaaaagtttcaaacaatttattggacaattgcaccatttaaaatgagttacaaatgtcttgcttaaatgtatgagctattagcacatagttgatgaccttatagagagacattaaagcaaccatatcctcaagtttatgtctatattcccaggggagtacaagaaactggtctgtagacctgaaatagataaagctgtgggcagcattctcttctattcatttgttcctttggtcaggaatctgaattttgagacatattcaataaattatgcatactcaaatatttgtgctcttagcttattgccacagaggaaaagagattatttcctactttttagtatctctctgcttttgtctgatttgtacaatgttgcctaattaatttttcttaaacactttgccctccacacattttgcctaaaaccttcattggctcttgtaagatgtgctagcattctagggtctcagtttactgttgctaccctacttaaatgaatctccaatgcttcctaattgttacttcttggcttcaaccaatccaatgagtttcctttctctgacacatatcagatttatgcaaagtagtttcttggcttaagttgccctatatttctacaaaggtctagtcagatggtcagatgtgactatctctacatatgggtctgaaatctagtttaggaattctatgctgtgaatgttttagcttaaaactctaaaatttaactagttttttgaattctctctattatattacatgcttctggaataaatataaacacaatgaaatcctttcttgaaaatttaggaagatgttatacacaatataaataagttgtaagatagtgatttctactagacagttaaggtattaaggactatttgtccttgtattaaatggacccaggctatgcctttctagtgtttttgtatactctgattttttagtggctttccattaaatcctgaaagctcactactaagactcatgacattttttggggggttagaaaaattactatgattcagggctgggcgcggtggctcatgcctgtaatcccagcactttgggaggctgaggcaggcggatcatgaggtcaggagatcgagaccatcctggctaacacggtgaaaacccgtctctactaaaaatacaaaaaattagccaggcgtggtggcgggcgcctgtagtcccagctactcgggaggctgaggcaggagaatggcgtgaacctgggaggtggagcttgcagtgagccgagatagtgccactgcactccagcctgggcgacagagtgagactccgtctaaaacgacttgcagcacatgaacttacttactatgattctctctctcaaataaaattctggtgacttttctttaactcaccaaaagtagatacatacatatttataattcattgtttgaagaaaagccttaagatattttgaaataaaattctacacacattacacagaacttgtagctacatgaggagagcaaggtttttttgttttgttttgttttgtttttgagacggagtctctgtctgttgccaggctggagtgcagtggcgcgatctcagctgactgcaacctctgccccgccgggttcaagcgattctcctgcctcagccttccgagtagctggaagtacaggcacacgccaccacacccagctagttttttattttaatttgtatttttagtagagttggggtttcatcataatggccaggatggtctcaatctcttgaccttgtgatctgcctgcctcagcctcccaaagtgctgggattacaggcgtgagccaccgcgccccagcctgtttttgtttttattttgtaaaacggccttctccacgctgaaactctctctcttttgctctttcatctgtcatctcctccccactcccacaccccacactcctttacccaatcttgccactgcaggacaagagataggatgaaagttggaaaataataatttatggagaaagcctgtgttccttgctttatgaaagtaaattgtagataattaatgttgtgacaagatgattctattttgatgaataaaatcattgaaaagctatcaagccccactgtttctctgctgagagaactttttttcctctctgttctgcattcctattcttggctttcttcccaattagtctctgctaaagagtgataattggggagataggattttcacctaccttgtgaacagtaaaaatacccatttttccaccactgaagctatgtgtattaatattctatgctttcagaaagaaaatcccacactactgtgattcctgcttaaaaaaggaggtaatctaatgcccaagtaaaaacaattttatggtacttttatgagcttctgggaacaatggccatgtgatgttcagttgcgtgtttcatgtctgatgactgagttcacgtacgtcttagaggctaaatttggtttaaaatatcttacatcttctcaaattccttataacaagagcagtaaattaaaattaaatttcgaccttaaatggattgcatgttttccatttgtaatatattcgtatggttcaaaaatctgaaagagtaaatgagtacatagtaagagatttccttcctacatccccatcttcccagctccttttactccccctcccttctgcatgaaaactactgttactagttttttatgtgtccttccagagttttttctgcatatacaaacctaaaataaacatagattcttattctcctactttttacaaaaaatgtagcacattttataaatattttgcctcttgatttttttcttgcttaacataatatagagttatttccatatatacatacatagggacatttcttaatttttttatagctgcatatcatttccttgcactgaagtaccataatatatgtatatttcacaattacctgattcatgtatatttgactagtttcaaatcttttgatattataaacaatactgcaaagaatattatatatgcataattttatacagtaggataatttcccagtattggaattgctaggttagagtacaagtttatgaatgttgatcagcattgtcaaattgcccttgtatagggattgtgcttagttcggctcttaccaggcttatatgagattgttcctttttcctcagccttaccaatagagcatgttgtcagcctttggcattttgccaatgtgataaatacaaaataatacattagcaaatttttaacctgtgcttttcttattatgagtgaagtaacatattttcatatatttgagtgatgttcctctatacatgatttgtatcttttatttttttcaacattcaaatattttattgttgatctttttattatttatttctataggcttcatctaaattgcaccttttcctgtgatataaagtaaaaaatgtttcagaattatatcatttgtattttgactctgagtatcatctttttttctatttttgtttttttgtttgttattttctgaagaattggttgaatttttctagttcatttttcttcgtggcttctggatttttagtcataattagaaaaggctttccccttccaagattataaaggaaatctcctgggattttttgtacttttgtattatctttaatatcacataaatctctgattcatctggaattggcttgtagtaagaagtttattttttctttatatgacttaattattgaattgactatctttttcccactgatgtaagatattacccttattatacactaaattcttctctatgttgagcaatagttttgaattttctgttcaatctctttggtctgtttatttatgtgccagtattcagggactatatgttttaacatctagaatttctaaactacctttaataactgaaattgctaagctgttttcctatttaaaagtttttctgaatattcttttcttcttttttctttataaacttccagattaacttgttttattcaaacagctggtgttttaaaaatagaattttattacattttcaaattaaattgctgtctttatgatctcgaaatttattctcaaaattatgatattactttttcagttgtgtaattccctttgtttcctctaatggtgctttaaatcatcatataaatcttgcacatcaactttatcagctttatctcttggtattctatctttttcatcactgttgttagtgatttctatatgttgattttgaattctattttactcatcttttattgcttgtagttgtttttcagttaattatcttttatcttccaggtgtataatcatagcttctgtagtaaataattcctttgttttcctctttccaaatttgtatagatttaatttggttgtaactcgtctaatcgctttggattgtacctagagatcagctttaaattttatcagtgatcatctttttcttgtttctgacttctgggattctaaaattttgtcataaagcatgataatggtttttggtctcggttggctgtattttattacgttaatgaagtatccatctgtacagtcctagagttgtagctggacctgtgaacaccaccttaagacacgcatttctcagccccgcttgtatttaagccttacttgtatcacctagtgattcatgtgtgcccatgttcttgccattgtaacgtaagtaaaagtgatacttgccatttcttccacatcctttcttttcccttcttgctggcaggaaaccagaagtgatggcaacccagcctcaactatgtaaaggacaacaaggccttcagggatggctgaccatgagatggagggaacctgggtcccagaatcacttcgtggaacagactactcccctgaacaacaacttccgattattacttgagaaagaaaaataaacataattgtttttttttttttttttgagacggagtctcgctctggcgcccaggctggagtgcagtggcgggatctcggctcactgcaagctccgcctcccgggttcacgccattctcctgcctcagcctcccaagtagctgggactacaggcgcccgccaccatgcccggctaattttttgtatttttagtagagactgggtttcaccgttttagccgggatggtctggaactcctgacctcagctaatccgcccgcctcagcatcccaaagtgctgggattacaggagtgagccaccgcgcccggccaacataattgtttttaaagccattttattgttgagttttttgttacacaaagccctttattaccatgactccacatttatagttgacccttgaacaatggggttagagggttaggggcaccaaaccccagtgctgttgaaaatctgcatataatttttgactcaccaaaaacttaagtactaatagtctacttttgactggaagccatactgataacctaaatagccaatcaacacacatatttcatgtattcatgacacacgtttttcttaaatttttctatatttctagtctgcacagcaaatctccaagcaatttttatgtatatttattttttaaaatctgcataaaagtggatttttggagttcagacccatgttgttcaaggttcaactgtagtccttttttttttaggtgattttttatttaatcaaatgatttatttttttttaatcaagtgatttttttttttggtcaaaaacctttttcatctatggaaattatcttgtgctgtatctctagatatattcatataaattatattaatggttttacaatatttgaccattcttgctttccctggaataagtcacatttcatataacgaattatttgttcaagtgcttctgggaatgtttcaccgatattcatacctaagattcgtcagctgtttttgtttcctgcagtctttataaagttttgatattagtgttactcttttttgtagaggaaagaataattttttaaaatttttccttgttctggggctattttaaaatgctggaattcactgttctttaaaaatgtggtagaattttcctagaaaacttccaaggccagaggtttcagagtattaataattggcacatttctctaattcatttgttgaaatcagattatttagagtttctatatcctttggggtcagttttggtgaattatacattactagaaaattacatatctcatccagattaaatttattttggcatagagctgaataaaatagtctcttttggcttttttatttttctttgtttttgtggctttttaaattcttattttcatgtttgtagtttgttcatatttccttgaatagtttagctgtgcttcatacattaaatatttttcttaaaaaataatttttaaaatgtatttattctattttttccctaactccataaatattaactaccctcttctccttttccattgattttttgttcttttctataaatttcattcagaaactcaatttccttattttctttattcttttaaattttttaataaaaattaaatgctctgagttttcctttgagcagtgctttagctatagctcatgaattcaggtatgatgtttccattaatattatatattcagatatatcagattgcataactctttgaagagggaattgttttggagggggttttaaaattaccatgagaaaatttttatttttctccagttttatcaatttctatatttaatgtatcatattaagagtatgttttcgctgttatttctagaatttgcctatttctgaaattttctttatagcctcatatgttatcaattttaataaatattccataaatccataaatatggattgttgaaaagaagataggtctttttatttctaatataaagtatttttggtatatcaaacatccataacacattaatgatgctactctattctcatagcttgagagaagagaattactctcttctcactagtgtgtttctgtctcttatttcctgtaatttcaggtttgtgaacattttgctattcataacaattttttgtgaattacactctcttgagttatacaatgttgttttttgcatcattttgggcctaaattcttgcttgtctaatatgaaaaataagaccatctacttggattcttttctgttttgccagtatatctttttccacattttaattttaattattgtgaatcagtttgttctagctattcttttaaacagtattgagcttggttttactttctcattcaatctaaatatctttgattttaacaagtaaatttaattgattgatactgatatagcaggtatgtttgttctgagtgctgccatatgttaaattttttgctttcatgtttgctttatgttctttaacagtctttcattatgttgtctgtgtacttccctttgttttaagtatacttctgatatgtgtgaaggtgacatatttattctattggctatctttataatttagttgttaaccttttgtaaactatgtttgtacttctatcagtttttttgatctgctttaatgatattacttgatttccaggaattttagtaaaataatcaacaaacattttcaacttcctaatttcttttcccctccttcgcatttttaaaaattttaccagttctgcttggcagagcacataatattaacattcttttttggtcatcccaaccctcaaatcttttctattatttccccagtcatatttatttggctgaagaccacctactactgtcgtcaagaaagattaaatcatttttgtaagtaaaagctgtttgttgcctttattcctaaaggacaacttgactcaaactttctttttctgaggatcttgtagatggtgctgttaatacatgttttatggtgttaaatgcaactgtagagaaatctgattttcatgcttataagtaatttactgtttttgctggactaccttacatattctttctttaccatttgaagttcaataactgtctgggttgtctacactgggttagtttttccttgcctccagtgtacctttcaatatgtatagtattattttatttcaaagacttttggggagcttatatctttaagttgtctttatgtctctctgtttttcctttttaagtactctgtcttcttctgttaaggctgctatcacaaattatcataatctaagtggcttatgaacaacagaaatttatttcttacagttctggaggctgagaagtctaagatcaaggtactggcagatctgtgtctggtgagggctgcttcctggttcatagattctgtcttttcactgtatcctcacgtaatggaaggagcaaagaaaccttcgggttctcttttatgagggcggtagtcccatgcttaaaggctctgcccacatgacctaatcacctcccaaaggtcccatctcctaataccatcaccttggaagttagggtttaacataggaattttagagggacataaatagcacactccaaatacgtttgttgtatctactttgcctgtcttctgtatccgtcatctagtctctcattcttttcaagtctttattttcattttattttgttctcctttttttaattagcctttatgttccttattctattttctgtagcttttttttatcatttctgtgatttcacgctattatttcttgagctctgacaggttatatttgagcatttcctcttgacttcctgtttcttcttcatgatcttttttttttttttttttttttttttttgtgatggagtctcactctgacacccaggctggagtacagtggtgcattctcagcagctcactgcaacctctgcctcccaggttcaagcgattctcctgcctcagcctcccaagtagctgggactataggcacgtgccaccacatccggctaattttttgtatttttagtagagaaggggtttcaccatgttagccatgatggtctcgatctcctgaccttgtaatccacctgcctcggcctcccaaagtgctgggattacaggtgtgagccactgcgcccagcccatgatctttcttttaaaggcagttgcttcatttattttacaaaactaatgacaaaaattttggttagacttttcattctgtcattgaagaaattcttgtgctctttgtctgttggtaagtgttactgctcttttttttcttatagtaaccgcatatcagtgttgttccatctcctttgctaatgctcaatactgaatgaattgggtcttcatgccttaggtatattagcagaggtgtttgtgaggtgggaagatctaggcagtcttctaaacttcacatctgaaaggtgttctcattaggtggttccacagagacagtgtacttgctgctaatatggccccttcttcaatctgtctgtctattatgaatcaatcaatcaatcaatcaatcagtcatctctctgtccatccatccacccatccatccatccatccatccatccatccatccatccatccttctttcttttctgcctctctagtctaaactgtatttaggaggcttcagcagccagccctactcactgccatactccttctaaatttttttttttttttttttttttttgagacggagtctcgctttgtcgcccaggatggagtgcagtggtgggatctccactcactgcaggctccacctcccgggttcacgccattctcctgcctcagcctcccgagtagctgggactacaggcgcccaccaccaagcccggctaattttttgtatttttagtgtagacggggtttcactgtgttagtcaggatggtctcgatctcctgacctcgtgatccgccggcctcggcctcccaaagtgctgggattacaggtatgagccaccacgcctggccactccttctaatttttaacacatggtgaggtgttgcatattggtatattctactgttattgtaacttcttttccatggtggtgtatttttgttggtattttctgagaactgttaatggtaagctacttaacctcactcttcacttcattttctccttaatttatttccttttgcttctatcagacctttgccctattgacaggatagttgagtataccaaaaatacaattttagcattgcagggtgccacacatgttgagaaaatatttttgccagtgtctttggaaatttgcccttgaagaaccaactattctctgtttcttttttttttttttttttttttttttttttttttttttttttttttttttgagacggagttttgctctgtcgcccaggtcggactgcggactgcagtggcgcaatctcggctcactgcaagctccgcttcccgggttcacgccattctcctgcctcagcctcccgagtagctgggactacaggcgcccgccaccgcgcccggctaattttttgtatttttagtagagatggggtttcaccttgttagccaggatggtctcgatctcctgacctcatgatccacccgcctcggcctcccaaagtgctgggattacaggcgtgagccaccgcgcccggcctttctctgtttctttataatgatttttctgtacaatatcagttgcctttgggagactatgtatgcttggaagtgtgaacattatatctgttctaacttttatgattaaggagtttatttttttcctcatttttttcttttctttgttgcttttgtgtaatacccagcaagtggaaggttatttattctgatgccttgtttgtactgtaatttgaaaactgacattttgggataattttatttattttattaagattttttttgtattggtggtcatgtatgtagtttaaaatgaagtgtggatttttaggctataaaattagccagggtttagaatggtaaggtggataaagcacatttactttttttcctccatttttccttttgaatcctgatgagtattatctagttttcatttttggtaagttctccacattcatggactgctttgttactattctgaccataaaatgcttgaatttagagttctatgtgagaaaagtgatccttgttgtgctgttatgactaagcatattgtataccacagttaggaaataaaaagcactttgcttcctgagataaatcatctatatgcatctatccatgtatctatcaattcatctatctatctgtctatcaccttatctagtactattccctcaaattaaggaaggcttgagctctttcttataagttgctaactctctcattgaaataattcattccctgaattttgcaaaactgacatccataaatttgtgatgacccttgaagatatgattaaaaaatgaagaaactgttctaccatgaataggctaattgtaactttagtagccttgtgatttttttttctctaaatacccgctgtgtccatttgtcaaagatccttgcaaatatttaaattttgcatataaaaaatacctttcaaagaatatttttatgtctgcatttttcttttaccagtgacatttcactgatcatagaaatgaaacccagagttattgctatatttatgaaaggatgaatgtataattgattaaggagatctatttaatataaagcttataattagggtcatgataaagtcttgaattgtaaatatatgttgtatttattgaatagaatgcaattagagaatacaaacctataaaatatgtaatattagaggtggaaacaagacaaagtttctttgacaaaaaggtgcatgtacatagatttaggtcagagattgactaatgcttaaaaataaagaaaaaatgaatcaatttaattgagataaatgatccatgattaggataagagaaagtctagctattcaattcagagttcacttgaatgcatgggctgctgtcaagtttttaataaaagtacagagcagcttcctaacagaggtatgaataataagtttatatgtctctgaaacaatgttaatataattgaatcaaagaaataattaaatgtataatagtcttctatttaaatttgttcttaacagtgcaatttcttatttaaattctgtattatgaatttaattatttttgtcaagattttaaaaaatcattattataaccagttggcaccataattacttttagggaaggaactgtgttgggtgcggggagcaaaacttggtaagtcacttgggattaaaggtgtgggactttgaggatagagcctccgtaacaggataagttattctacatgagaaaatgggaagtgtttattttgaactactatatggattgggattggaggctgaaggcagtcttctaggtatcaaagggcagggaggttttacctgacatatgaattattgtttcatgtaaatatagttgaaagtcatatatatttagaattttaaatacatagtttcaagacagtgcttttaattttttaagaaaatatgtgtcatttattttttccaaagctagtggaagtttctttgtgtcctaatagcaattgcgtgaatgaaatcgacatgaataatacttccagttagattttcataaactgacagatagtttcataaatacccaatatgtaatgatagtcagagggagaagctatattaagtgtgtatttcaggagagattgtcctctggagcatatactagcatcaggcagctgctttatggaaccacccaccaattcccttgggttgttgttattattgtttgttttttgtattttgtttagtttctagggaacataattttctttgtgtttctttttgcatgatgctgaccaagtcatgttcataaatcacatatgttgatatctacagtgctttcattggccttccaactcgagcatggcaaaatatgcttattttccttcagaagcgcatctttgtgttaactaggcattaacaatatgtgcttaatagcaattatcttatttctaaggatctcagagttggtttggcacattgcctcagtgctcttcaaacattatcagagaaggacaacataaacaataagatttacactgtaaaattagcctccacttacaaattcttttatcagccaatccttatcttaataacatatattaccttttattaaagtaaatatgtccctcagctctagcttttttctctgtatttttatgtacatttatggagttttactgaaatatttagaagactactgtctaaatacggttctaatttttaaaatgcataatctttagggtaaagtcttggagagtggcaagtttaatcaaacagtaacgctatcagagataaagatcataactcgcattaaattctataatttaaaataaactatgtctggtatgtattcagaaaatgtcagagctagaacatttagttcagtctctatttcatgggttaaagaaaagaaagcttagaacagtgaaaatacttcctcaaggtaatacttacagttcatggctgaagtggtaataaaagtcacaaccaactttttcctctctgctttcttttctttctgttctgtcattttaagtttcttaaaggaaaagcttagagaaaattaagtattgatgatagagcagatacaggattttcaccgggtgcagtggcttacgcctgtaatcctagcacactgggaggctgaggcaggtggatcacttgaggtcaggagtttgagacaagcctggccaatatggtgaaaccctgtgtctactaaaaaaacaaaaatttgctgagtgtgatggtgcacacctgtaatccctgctactcgggaggctgagccaggagaatcacttgaacccaggaggtggtggctgcagtgagccaagatggcactactgcactccagcctgggcgacagaatgagactccatctcgacattaaaaaaaaaaaaaaaaagaaaaacaaaaaaaggattgtgttaacatgggggcctgggtgagaagagaaaatttatttataggaggacatgtaggaagggcactgaagattactgtttaccattttgaattgtccctgctccagtcttacaaagtgggacatgcattgtgtttcttgggcatactcacttccctaagaataagctgtatcatccaatgctatttgcacagaactcacggctttatatttactgtcctaaaataagtgatttacaatcttttaaactttaaaacagtaaatttgattttcagcgatgcctttttttttgtcattttaaggccccctccaaagtgttgtaacctagctgaatgaaaaataagtggcatttttgttgttattgttggtgatgatacttttcatggcaatctttgagatacctaggaatattccaagtttttgaaaaatcatggttgggaattaccactctggaaacagattgccatggttactgtgttaatgctgtgattaatgcgtcttttagtcttgtatgtgtgtgtagatgtagacataattctatattctagtttggttaacatgtttgatctttttctatcagtcagagacataaaaatgtcttgactctcttaaaaacaagactgttcccattttttaacctaatggatatttgttgctgaggatcatttttttgtaaggagtgaaatacccagaaaactaaagtggtctagaagataactgctagttctacatttttttttttgtctgaagttgtgtttgaatttacttcctttcatcacttagtattaaaagaacagtgtgtcaattatagataagaattctacatcccctgtctttccctaagtacctgcttcgaaaaatgggtgcaactagactcagtagctagatgtggtatgtggaatgtggattcgttcgtatcaggcatgcttcttataggaatcctttaatgcactcagtcacccagagcagtcaaaggcctaagctgcttcatactttatagcagggcacagtcacttccataaatactgtgcactcccaagtaaatccagaatgtttgcaacaggatttgtgtaccatccccaattctctgttttcttcaataaagtctttgtacacaattgtttgattgtttttatctcttgatactcacaaataatgccactggagaaataaacctaagacatatccaactggatcactttatatacagagatataacatttcaacaacagaagcctttcttgttgaggggatgcacatttggaatactctcaaatgattattcgaaatcaagaaaaagagccaatgagaaacagcaaaacacaaatatctctaataaggaaaaatatttctgcaatgagatttttcttagatatatatgtgatgattaagagcatttgtttatattgtaggttcttgtcctaaacttacaatagtaagtgtagacaacactaattgttatggtaaaaggtgctacatgtgtgtatgtatgtatatgtgtatgtatatgtatacatatattatttggatattccagtcagtggtacttactgcccttggttaatgcataattgtcttgagaaaatgattatatgtatcagtgtgatctggctaaaacaactctctccaactgatcacctgattttgtttcatttccccgggtaatctggtaggtggccatttcttttctttctagtctatgttccctcctaaagataaaacttggtcaaacatctatttatggtaacctgtctttaagatagtttcaggcataccttcttcctttaatctcatttggttgatatgttagatcctttcctatcagccagagaaataaaaatgtcttcagtgtcttaaacaaaattgtttacattctttaattaaatggtcattttaaggagagaaatgctcagaaaattaaactgagtatagaaggtaactgctaattctacatttcttttctgaaattgtgtcttcatttgttttttaaaaatcatttagaagctgtgtagcccacagagaagttctcaagtttgtggaaaagaaataattaagtcccgaagttaggggtagaagagaatggagctttgttggtcaattctgacatcttagaacacctcagtaatgtggttctttgaaagcatcaaatcgctgcggttactttagaaaggtcatttttagaatgcttatactacttttcccccattttgaaggtcaactggggtttattttaagttagtattgatgtaaaagatggcacaccctcttctggggcataaatgcttgaggatgagccatagtcatgcatgacatgtgtcaagataagaaatggaaatttatctgcagagactaccatatgatgtatgtgtaaattttcagtccctgggattatgatttttttttttagtgaagacaaatgttttttgttagttagatcctgatttttggcatgatttagtaggagaaagaaggttttagtttagacatagcttttcttacatcttgtgtaaaattgtcagttatagggagggtaaacactgcactctggaaaggccttctggaatgtccttatttctgtgtgagtgtgatggaaaaaaataacttttaaaaaaatacatgtttaatgaaagatatttccaggttattccttctggattttaatttaacgcttgtttgtatctctatgatagcatgtatgaaaatgtattttaatgatttaattatctccccatattagatgatcttgctatctttatcatatgccctgtttatttttctattcctggtgataggtggagtgactgatacattgcaggtacataatatacatttttgagtagatatgtgtatgattaattgacattttgcaagcctttttttccaacttttaagttctggggtacatgtgcaggatgtgcaggtttgttacatacgtaaacatgtgtcacggtagattgctgcacagatcatcccatcacctaggtgttaagcccagcatccattagctattcttcctgatgctctccctcccacccctcaacagtgtgtgttgttttgacagaccccagtatgtgttgttcccaccacgtgtccatgtgttctcatcattcatctcccacttatgagtgagaacatgcaatatttggttttctgttcctgcattaggcaaaccgtttttttgtttgtttgtttgtttttgtttttgtttttaaagaaaaaagaaagacatgctatgaaatggccttggacctaattcaagaaacgaaagaaagtcagagatcaaggaagaaaggaacaatgcagagtttatggaagttagatgttaagatgacagctgagtatgcttcttttctcctcacccttgtttagccaggtgcttacttgacaatttgtaaattaaattattccttgaacaatattttgcacaggagtaaaggaatgcttcatggataaacagaggcaatacctggagctaatctttgtggataaatgtgtttattttgattcctgaagctgggatgcagaactgatagagggaagccagggggttttctctgctccaccaaataaatcacatatgactagaaattgcaaccagacagcaatctgtgaagcaagtgataggagctccaccgtctggtgcctgctgtggatgtctggcacccattggtaccagatttggtgtaagtggggcttctgtttaggaaactttgccaatttttttttcttgaaaagtggattttggctttgtttctgcattcttatatgggaataaaaaaatctcataattgcaaatgtgtttattatgccccaaacattagatctaggctattctttccataggatattgtaatcctgtgtgggtacatttgctgctgcatttgacacagtaaagttgtattaatgtttttcattctgctatcttttagaactaagataggcataattcctaatttatctgtgctcccccttatgcatacatttaggtagtcaaaccttgagagtttctatagaatatttttaaaacttacctttggtctgtcttatccttggaaatgttttcacgtttgagagcatcacctcctatcagatcattctgttccttgaccctctccctctgacaaatttcacatctttcttcgcaggaaaaaagaaactaaggctatatcatggctttcttcactcctcttcattctgatatgaacatttgaagcaagcattgatttttttcttccttcttcttacttttgccagaacccatgatgctgtttattctggtggggtgtgtgtgaaacgcatgttgcagttccatctctcttgaccttttctttgtttgctatgtatattgcatctcctcagttgtccaggttatcgcaagaaattgtgctggatttctactcgctcaccttctatttcttactaaatattccttgttgtatcataatccctctcaccagaattcctcctgtgtgaactcatagattacaatctacattgctgcaagagactaccaaattttccatctttctcaggtttctgcaccttcactcactcttatatctttccaaactttcctttccatctttcttaatgtcaaacctgattagtcattctcctgcttaaaatcttccaccgagttctcagggctttcaggttgaagttcaagctcattagtgtgacatacaaggctcttaggacctggtggtctcagcccctggctacttccctaaaacactgcccactcagaccagatctaactagttttagttccctatatcatggtatactactgcgattttccatgtgcgcttactttactcccaggtctctctatcctcttcctcttcatgtaactaatttcttcctggctctttgacactgggcatcagtgtcatgtccccagtgtctaatgtgatgtctttcatctgttctcttataggcttggatgcatctccttcctgtcatcttactagtattattgttcactgtccttccacggtggcacagagtccccagggtatatcatagtattgtttgcaaaggtctactaagagtaaatgagtaaatgaatctaataattttttattgctttaagtgctctgtattttaattcactgcctatcaagccttgctctctttgaattatatttatgtctaaatgttcatgatagcatcagattgaattaattgtagccttatatattgactctcaaacatgaccaagactgttattgttgactctatattcagacaaataaccagacacatagagtaaaagagttaacccatagtctgtatgacctaatgaaaagagcttagacaagaaccaaggagcaacagtctcaaatgtcagatgcctttgccatattactcccatttctttttttatagttaaaaatgttaaattttaaaggttaatgtgatgctgctaagccctctgtagggtgattgatcagcttaaatgtaaactattttggtgaccatgatatataaagtcatagtgttgaaaaaattcaacaatagttagaatcattttaagaaaacaacattgatatatgaaaatattcacaattgagaaatcttatattgatgaacttagagattatacattttggtcttgaggcagaactcatcttagtaaaactgcttaagaacttaatcttgatcttataaaataaataaagatggtattttgtattttaaactattgagtatgatttcttgctgggatctatcactatgaaaagtgattattggtttagagtggtgttctcgttattttgggttttgaaggagcacagttcatcctgttggtctgtgttaaccaggggtaggtaaagaggacagaggacacctagcaatggctcaggtattatcagtgagcagggtgagaaaatccttgtgtaccaagaggaattttgtcatggatttgcagaactttcaaaaacaagaaacattatttccacttttcgtgtgattcctctcactttttaacctcttttctcttttccttcttttcgagatggagtcttattatgttgtccaggctggagtatattggctattcacaggcatgatcattacacgctacagcctctgaactcctggctcaagtcatcttcccatctcagtcttgagtaactgggactatagatgtgtgctgtggtgcctggcagagcctcttctttaactgtaatagacctgcttatcatgcatgaaatgatctacaaacacaaagtaccctatcatcattatctctttggagtactatgtcctttaaatgtattttcttactgtaactaactacctaggctggaggtcctatctctaatttagaaatgaagaaagtgagacctacttggattgagtgagcattcgaagtacattcagaagtggaaattatttttaaaagttaaatggcttctagaggtcatgtagtctcttttgtcatatagtggagaaaacagagaagttcaagatttccccaaacgttcttagttactggcaaacaggagctaaatgtcattcttcctggattttagtcagtatttgcttggtcacttttcttagtagagctttttcttctccttgcattcataaacacttaataaaagtgaattgataatgatcatatatattatataattaggtaatattagccgggcatggtggttcatgactgtcataccagtttcatatattagaagaaaagtacaaattgtgtagctactcaagtgcaaaatgtagagagaaaacctagagaagacatgaaactctctccttgactaatatcttcaggctggggatactatgaacaatggtgtgttcagaaagaatgaacaaaattgctgtagtaactcaatttcagaagagtttgaccctgtcagaatcatctactgtatttgcatgagaaatatgaaaggagtccaagggaaagatgatgtgttcagtgttcttttccactgcattggagcacctgaggagctgaagagagaaacttgtgtttcttctttgagtggcaagtgtgttagttaatatcatcaggcagaacatgctttccaagagtttagtttgctccttcacaaactaaaatactctgaagtgcctgattttatgcaaattacttttggttgttgtattgagaaatgaaaggatgccaacatttttttttataaaccaaatactaattagcattaccaaatttatctgttgagatacaccacttatttgtaagagaagctctttgacaaaatgaaagaatatgaataaattcttcacactggctatatgagaccttggaatgtcattttcttttttttctgtagaatttgtgtaataccctccactttgttggactgaatgagatgcatacaaaacaaccttgtaaattacagcattctaggtcagaggctagaaatattttctgtaaaaggcaagagagaaatattttatgcttttgtgaaccataggtctctgttgcatctactcaactctgccattgtagtgtgaaagcatccatagatagtacataaacaaatgagggctgctctgttccaataaaactttatttatagatacagaaatttgaatttcatgtaatcttcacctattgtgaaatgttatttttctcttgatttttgtaaccatttcaaaatataaaaaatgactcttagcccacaggctgtataaaaacatgtagatttggtccaaggtctgcaattcactagcctttctccaggtgactgcctcactatgaaacagttccaagtataaagggattaggatatgatgctgatgttgggattgcatttactgagctatctaggtgattgactccaggctctctctctgatactgagaacatgccttggcatatgttcccagctaacgtttgagaaaactcattttcggaggaataattttctgttgtttgttgctgggagttgggcagaatatctcaggtagtggaaggaggatactgcaccacacaactcatagaactgaattgatacagatagatgtcagcatttctgtgcaaaaacaaatgtttcaaagttttgaggtctcagcacttttccaggcacagcattctggatcttggcacacagatgactctcagtttgaatagaaaatgctcacctttctttttgctagttttattccagagccaatctctttataataaagaaagcaactgaaaatggaaaactcactgagcttaaagcagccaaaggaaaaatatgtgctcattttaagttttttcttttgcaactcttggccaaataggtttatttttaaatacttttcacaatttacaaatgtttgccttaggactttgtgtaatggcattggttttatacagctattacagttagggtgaagagattttcttcacagagatggttttggaaaatgtctcatcacacaagtggtaagtgtagtcgctgtaattgtattgaagaaaagaaatgactaatgggaatcacaaaattgtgaaattgatgatcatttctgtttttattgcctttattttaaacataatagtgacaaagtctgaaacaatatttggagattgctacatatttaaatatttaatgcaacaagcatcccactttattataggagatagaacatcgactgtgcctaacctaaattacttttccagggggttttagtggattattttcctattaaaaaaaggggaaaaaagaaaagaacagtctggtacaaagtataggtgacggcttcagctttgtaattacctattaattgatatctgtatataagtataacaaataaagttttaaatactgaaaatgagatgagagatactaaaggaaacaatttcctgagaagtattaggttagactgtacaaatgtaaaaaacatgtcaacaacctggcagcaagtagtcttgagaccttgaagttcaatgagagcagatgaattgtctgctcttttaatagtaataaaaactatctaaggcaaaattttggcatgtaacttaagaaacttaaaaagtttctcatgctttaagacactttgattttattagatctagaatgaggtctgggaatgtatatttttataaagctccactggtgacctgggtcaagttttgcaatacagaatttgaggcagataatattatgtaggaggtaggagatttattggggagtgctagaagtaccaataccagtgggggagtgaaaaaagcatgtctgtagagcagaagaagctggactgcagagcagttgcagtagaatcccatctgatcctaaggagccctggagctggcattccaggccctggagagttgtcctggaatgaggcaaggaggagggtttgtacccttgcattcatcagtcatgggatacaggatgccccagggagtgggtgaaaacttgagggagatagctctttccaacagagggtagtgtccagagaaggtctggttatgaggtgtcagaagccaacacttgcaatcattggacgaatttcagtcctgaagttgtttctaggcagcacaccagtgtgtccattacaacaggctattcttatgattgaaaaacgattgtctaaggggttgttgggaagaagtacttggactggagggtaggcaaggagtatttatctgtttcttaaacatgtacggagtgcctactatgtataggtactagagacataaacatgaagagataagttccctacatttaaggagcttaccatctagtgggactcagatatgtaaataaataattaaaacataattgtcaaaacaggagggtatgtggtatgtgcatgtttccaggttttaaaaaagctttacttcacaaacaaaaatgttctgttcattctgcttattttgatttgatagattacagctcgcagagctaatattctcttaatgtaagtttcttccccttcacagatgtttttccatctcctctaatttctcatcgttctgtgatgagacaaccagagtctttaaaaaataaatactttgcttttctatgattaaatggtttgatgaaaattaagccataagcataaagtgctaaatagaataaacccctggcacataaaatgggtaggtcctgatatcctctttcaattcttcaaatgtataggtagatactgataccctgtctcaactgtagtcaattacactatatattttcctctataaaatgtatcactggccacgttcagtagccctccattactgaatggggcaattattcaagaatgccccagtgaatgcctgaaactgcacctggtaccaagtcctacatatattgtcttttttttatatgtacatacctatgataaagtttaatttataaattaggcacagtaggagattaacagcaataacaaatacaatagtaaaacaattgtaacagtataccaacatcactgctcttgtacttcgaggccatcatgaaggaaaataaaggtgatttgtacaagagcactaggatattgtgataacgcagacatctcctagacaggatctactggacaaagggatgattcacgtcccgggtaggagggggcaggacagagcgggacagtgggagacttcatcttgccacatagaatagtggataatttaaaaattaggaattgtttacttctgaaattttccacataatagtttcaaaccaagggtaactgaaaccatgagaagtgaaactgcagatatgggaagactcctatagaaaatatttgggctgggcatggtggctcatgcctgtaatcccagcactttgggaggctgaggtgggtggatcatctgaggtcaggagtttgagaccagcctggccaacatggtgaaaccccgtctctactaaaaatacaaaaattggctgggtgtggtggtgcaaacctgtagtcccagctatttgggaagctgaggcaggataatcgcttgaaccccggaggcagaggttgcagtgagctgagatctcgcaagtaattggttatttactacataaaaatgttacgtagtattcatatttatgtttgattgcatcacttttttttaaacttttggctcaaatattggtagttttcaaggaacttttctgcagcattatatgaatatgatgacaagtagaaaaaccaaaagggtgcatcaatgtatgaaagctggtgtgttaaattgttatcatcattaacaattcactgctgcatgctaaattcatagctcacacaattcaatttatgccttataaaattacaaactattacaagtcatggactttaaggttgctcaccaagttatcaagaaggtcaaaggtaaatgcaactgtactattctatggtaatttttcacaaatcccattgattcttgtttatgatactatttcataaaactcagggtcatataataatgttctgtttcaaaacatgttggtgtatttcaaggtctcagaaaaggtattgaaattttttggtgagccaaagagaacaggaaagatgatgttttgtctgtaaattccatgttgactctgagttagaagagactctaagggtcatctggttctgggctgttagttttgaggtaataacgttttcatttacaaaaagaacattggtaaagtaataaaagcttatttttgtatatatacttatttacgcacagattatacatgggaaaaatggtgcccaggcagtttgctttcagtgatatatgttaggtgaaggtcaggaataatattgacataagtaaatattggaatagaaggcaagacttggaggtgggatttaaacaaataaacaaagttttttttttttttcctttttatgctactttgcaggaaggtcatgtcaaaattaaaatagattctgctttctaccttggcaagtaacatgtattatgcccactcacatgtaggtcttatctgctttggcaaatacttacagaagaaagtgtaatttggaaagagaagaacataatgatattagacaaaatagggtcacaaaaatttacaattggaaaatgatttgtaagttaataaaattacctagagccagattctactgtctaaatataccactgaatgtaaacaagcttttgctgagctagtatagacaggtttgaaaaacttggttttctccagtactcactcttatcaaggaggaaaaaggcccagaaaaaaaattctgaagagtatttttgtatcatttacttatgccccatctttttctcaaatatatttaagacagtttatcagaatacatactatgtaagaaaataacataaataaggaaatcagggcaaacagaatgtaaggttttgaaaatgaaaaaggatctggggaatctgaggataaagttaacacaaaaaatgcttgaggatctgttcatctgctgaatgacggttacaaatctgtaaatattctgatagccaactctaagagaaaaacacagttatttcaatgtttatagttatcctggaggagcccaattctttctctaagtgggaccagagaaaaatttcccctttgtcctaagaaagaattcctacggagtatagggtaatcaagaactcatgaagctgtgtgtcctgtaatgccccttaagtagttagatgattgcaggccaagagcaatacagtcaaactgattttaccaggaagaaaaagcagtcagtccaaaaacaacattcttgtggtttgattaatccaaaattggttagattcaggaatggaaatctgcatagactttaggcaaacctcaataattatttctgtaaccaagattctgataattgttgaggaagtagtgaattcaagcttatgctctctgtacttcctgacaaatccttggagtgcatcactgctatgttgttagtgcgtgtggacccatatgcctttgatatttgccaggctggggatataaatgacatataaagatgttctaatgagggctactcactctcttttctctctcacagacacattcactcatgcccatgtatatacagataatcatatagacatatatacacacacataactattgaataatttgttgtttaaaaaatatgtttcaaattaatggggaaagatagattggggaacagatgggcgtcagacaatttgctatcaatttggctagaaatcaagttagattcctatcttacaagatatgcaaaacatagaaggattataaagtcaaattaaaaaacaaagtattagaagaatatatggagcatttttatactcttgcagtagggaaagatgctcagagcaaacatgaaatccagatcccataaaataaaaatacgaagtacttaggcaaaaaccaagaagaaataacaaactttggtaagacacaaatgatagtaaatgtataaaagtcaatataagtaaaattaaaagagaagtgataaacttggaacatgtattctaaacatacaacatgaagaagcttagtatctatgatttttaaagaatgtcaagatattaatatacaggaaaaacagcagaatagaaaaatgagtaaagaacatagtttttttctttttgaattaattgaatttgaaacagcggtttttctccttcgaggagtaggacttttcacaaagcttcagtggattgttctaaatactggaaatgatatggagaagcacgtctcatctttctggaaagcgatttggcaatgtatatcaaaccttaacattacaaatgagcagacccaacaaatgttcatataaaactcacacctaaaaatataccagacatgaaggcaaagctatatatacaaagggtgtttacagaaatattattcttatgtcaagtgtggaaaatactaaccgaagtccacatgtccaactgaagaggaattagggtttaatgatttaagaagatatcatgaaactattaaaattatgtttaatgttaattatataggaaaatccttgaggtaaagttttaaaagtaggatacaaaattatgtcatacacacacacacacacacacacacacacattttacaaaaaccaaaatatatgtatgatatgtattgttttacacatggagagatataagtatacacattataaatacaaattaatacttttggtcatacaggatgtctctgttttttgaaatacatttttcaatagttttgacatttttagccataagtatatatcaatagtgttatttgaaaaatatttaaacagaacataactcagttaatatatatgtactaaataaatttataatttttaagggcagaaaagcataaatatttcaggaaattctgaactaaaacacagttgaaaacttctaagactctatatcaatatgcaattgcaatgttaaataaaataaagatgttagcaaatagcacaatagtagttggcatattggaactagaatttcatcacgttatttgcaagacatctaatatgagtcatttgacccaatattttccttgtcttactctgggatgatgatacctctgtcatggggttgctgtgaagagtcagtaagatgtaatcaaccagcgaatgttaggtgctcagtacattttaattcttcatcctctttctctttttcctctcagcacagataccagatgtaaaaatgttatttatttttttcctagcactagtaaggagttgaaagtttttttccataaaaacagtgcccagttcttggtgatgacagcagggagacctttctcactcctcttcagggtgaaggtcagtgggttcgttccagttcattgactggttgttcacagctgacgttatcacgattagacaatgctttgccttaccaattatttaacgtaactgtgcttctgtctttgctcataaaaactctggtttggatacttcactcattgaaagcagcagaggcaaatcatcaggtatatatacagcttcaatgcctaagatattgggctacttttgctagttagcctgtggtccagtagccgcccccacaccccaccatctatttttggaacgtatacaaatggagaaagatacattaggttcctccattttaatctagttatttttttaaaaaaattataagtatgaattttaggctgtaagtgtaattttgttagatggatagattgtgtagcattaaagtcaggacttttagggtagttaccatccaaataacatatattggccagagacagtgtctcctgcctagaatcccagcactttgggaagttgaggcaggtagattacttgaggtcaggagttcaaaaccagcctggctggtcaacatggtgaaactccatctctactaaaaatacaaaaattagccgggcatggtgatgcgcccctgtaatctcagctactcaggaggctgaggcaggagaattgcttgaacccaggaggcagaggttgcagtgagccgtgattgcaccaggccactgcactcaagcctgggtgtaagagtgagactctgtctcaaaaaacaaaaaacaagtatattgtgcccattaaataatttctcattatttattcctctcctatgtccccacccttctgagtttctattgtctatctttttatactctgtgtccatgtgtatgcattatttagctcccacttgtaaatgagaacatgcagcatttatgtttctgtgactgacttgtttcaattaagacaatggcctccagtttcatccatgttgctgcaaaagacatgactttattctgtttttttttttttatggctgaatagcattccattgtgtacctattacatttttttttcccagtcatgcactgatggacacttaggttgattccatattctttgctgttgtgagtagtgctgtgttaagtatacaggtgcaggtatctttttgatataaagatttctcttcctttgggaaaacacccagtagtgagagtgcaggatcaaatggtagttctttaaactctctaagaatctttacaaaatcctgccactgtaggtataaaacaatatgtggtctcacttagaataaaatggagacattttaagaatgtgttgtttgaatcctggccatgttctttcccagaggctacagtttggtgtagttcactggatgtgcctgtggacactgaacttgactggctattggatttctgactcctggaagattttgaggagttgcagctcttgttctctttcatctcccacccatctccagaaaagtccaggttacacctgtggaagggttaccagccagaggacagagtgtgaaggcttgcctggtaatggcaaacccagttgccatccacatgtcatactttgcaccatgtccctgatttgtatgggttctgtacatgtcacagtttctaagagtgaacctctctgcccccccgcccacatgactctgctgtcagctttccaaacaatgagaggacagctcctttgaaagatgtaagttttccattccgaaagatataaatttcctggtcctgcagaggctagaaatacctcttgtttgggtcactggactcgggctaggtgatctgcaagatcttacacaatgctactctaatatttcctctgtctccagctgtttcatgactccatccctgccatgtgtgtgccttaccatctttttaagcagagcacaggcctgggcagtggctcatgcatgtaatcccaggctttgagaggattgcatgaggtcaggagttcaagactaacctgggcaacatagcaagaccccatgtctacaaaaaattaaaaaaaagccaggcatggtggcgcgtacctatagccctagctgcctggaaggctgaggcaggaagatcgcttgagcccaggagttcaaggctgtagtggaccatgatcatgccactgcactccagcctgggtgacagagtaagaccttttcttacaaaaataaagaaatagagtacagattgtaactggcaacagtgagtctgtctcctccctttcctcgggcatcagagtcaaaagaatgacaataacatttgctataattattttaagtttttttaaatgatatggcccacatatagaaaataattatcatgttgtcttctaaaggatttgattactagaattagataactgatttctttctttcaaaaagtggaagcttttttttgtttgtttgtttttggttaactgcattttaaattttaggaacaagtagattcttcttcagtcttaaacttcagcacctgctaaaaataaggattacgtattaaacattatattttcccccagttttctctggatgttactgcaaaaatttactcactctcatttggatcacaggggctgataaatgtgtgtgtttccagatgctgcaccaggactgaacctgtggagtaggaaatgattctaccttagatacacataccctcctctcctgtttttttattctaagtctccctagcctcttaggtttttgtttgtattaccctccctctttcctgcttccagccatccctattatgactctaagggtcccatgaaagattaggtcatctgtgatgctgtcagaggcctggagaagtcctccacctatgtgtgcgtcatggacacctggacacaggctaaaagcttcttgagcaacttggtaatggccttctgaaaaaaaatgcgctcagccaatgtattactaattctactgggggaatttccaagtcaatttctggggactgagagtggtacagaaggatgagggtgtttaggtacactttaaattcacagtgtatgatgtgccctgaccacccccatcctccacacacccactacttactcctaaaacaattttttctaagccaaaagtggtttatgacaaattgtatgtttgcagatttggagtctaaagaggagtagatttatttaagggccatatttagtgttagtaaaagctacacttactatgctaattgcaacttaaattagagctttacctttatcaccaaaaaaaaccccactgtcttcccttgatgttaaattgtaggaatttaaagtaatttaaatttctattttttctacatttccgctttttgtatctgtacaatatgattatacatgtgaatggttaacaaaaactgtatactttagtctttaagtggaacctcagtgcaatattttgtaggcattaaaaatgataagcactttcatcagactattagttttcattttgttgactttgtttgtttagttctttgtggtataccctgtagttataatgaaatgatgtaaatctatatatttgccaacacatagatgtatttctttttaacttaactttttagcattatgcaggaactgctgctcactcgctaattatcccacagcctcgcaagatggcatctcctgttttctagcagatcaggatcaaaactttggaatcatttctctttctcttacacctcatatcccatccataagaaattctctgcatgtatctagaacttggcacttcttaccactttaactgctaccatccgtcatcttttgcctggattattaaaataacctcacatctgtccttttcttgccattttatcctttattcattagccagaatgagccttctaagactgtagtcaaaagtcatacagctcctttactcaaaccctccatgaacttctgacctcattcagtgtaaattcccaaggtccttaccatgaccttcaatgccctttatcatctggtctattaatgccacctgacctctttttctaccaccgccctcaggtcactctgcttcagacataggggcatcactgatgtttcagaagcactgcagaacccttgcactaactgcttccagtgctaagaatgagcttactttgtataagcatggcttaattccttactttctttggtttctgtccacatgccactttctcagtgaggccttcgctgacttccctgcatgagctagaatccactctgcacctggcagtctggacattcttaccttggcttatcctctattatcctagagatgtctgtcttcatccccaacacctagaacagtgacggacacatgatagctacctcatgattatatttgaatgaataaatctttaattatccataattgggtagtagacccaatcttgcacaggcagccaagaaacaaaaccaagaaaaaaaaacttagtttctatgtagacctgccactaactagacatacttccttttgcaggtgtttaacatctctgagtctcaaatgtctcaagtattaaaatacaatagattgaactagacaatttcaaaagttctgcttgctctaataaaatactttacacgaagtaaacacaattccactgatgtttgttcaatattttctatggcaaggccattcctcattatatataactcaagtagataagtagcagttgttatttgtcatatgtatgtatgtacgtacacacacatgcacacacaattcaccctctcccacaatatcactgtgttacacaatcctcagtcctattacctctgagacccattgtaaataaaatgtaaaatctttagagcatgttggacaaatacatggttttggttctgcctctttccagtcgcagacatcactgtgagattatagaactctttccatctaggccaagactgggtctaagaattcttctcagacttctaggaaagatatcaaacttattagagttgaaactagagatgtaacatagattttattccaggttttgggtatctgagagcctagaagtggtgtgagataaagaatttgatacaccttctccagtctttttgcttggttttccttcaattcatccttccaaactcattgtagataccacttctcctaggatttttccccaaatccaagactgtgttatgtggcccttgttatctgattacctagggccctggtctcaattacagaattattatgttgtaatttctttttaattttaacttgactgcatcatctacctgactgtgttctctagaggttcagaccaagaattgcgttttgaagactgagagctgggcctgacacttactagggacacaataaatgttgacttattgaacagataaatgaatgaatgaatgatgcccaggatagaatatttggtactgctgtcctgtctagcacatttctccaaggtaaaattatctcccacatatgacaaaaatctacctttctcttggttaaatcccttagtaagctgcctatcagagaatttgagggttaactcattcttttagaataatgtaaataacttggatgggagcaggctgtatgctttaggtcaattagaccaccttctcatgcctgagggaaattgtcccttaaggtctgttctatggcacctagtcccctaagatttgacaagaaagcgttccacagttcaatatatttggaaaacattgctcgctggcctttccccttgaaatctggccatggacattagcttattagagattctgagtcatctagtaaagaattctgtttaatttttttatagctagaatttttcatttcttttgaacttaaggataatattcaacattatatatattaacattctactggactaatgctttaggaaacagagttttacacacatagaggccatttaatagctttaaataacagtgtagcagccatatggcagtgagcagattggatttggaaaggggtaaaaccagtagggaggatgttgcagaaatctagatggaagaggatgaggcctataaccaaagtcctcatagcggccacggagaaatgaaaacgtttatgcaagaaactgatctcgttactgaaaagtcttttgcaagagtaactaaggtggttagagaacaggaggttggtactgtagtgctttccctcttctgcctttcaaaggtaagagcttgacttcgtttttaagccagcaggggttcttacatagctgagtgtctatcactacttaatgcatgtataatgccctgctgtactgatattcatgataaaaatcaaggtatttacagtcaattataatttcttattctcaaagcatacattgattttcttaaactaggcttttctgaactgggtatgataatacacattattatcataccattattaggcctctctttccaggtctttcagtgaaatctgtgtgtgtgtatgtatgcatttcctaaggctgttggtgcaaagaaacacaaactgggtggcttaaaaacaacagaaaccaaaatcaaggtgttggcagggccatgctccctgtggggttctggcagatccttccttgcctctccctgttttctggccatgtctgtcaatccttggtgtttgctggcttgtagctgcaatgcttcagtctccacctctgtcattcgatggtgtctccctgtatgtctctgtctctctctgtgtacacattttcatctttttgtaagtacaccagccaaattggattaagggtctaacctactccattatgaattcatcttaactaattacatctgccacaaatttatttccaaataaggtcacattctgaggcaccgggggttaggactttaacacacctcctttgggggcccaattcaaccaataactacatctgtgtgtgtgtggtgtgcacgtatgtgtatgtgtttgtaagtgcacacgtaagatgcaccaacatagatgcaaagacgtttgtcttcccaaatttactagtagtatttctggctctactcccatgaaattacctttaccctttctctttgaaggatggacaaagccaggtctgataaagcgttagaatttgtcatggctggtcttcacgcggcaaaccaattatgtgaccacccaggccttttcatcatgcttggtacattcatggaatgttatctcacactggggttggtaatgcaatactaattctaaaaggctattctgattaatgtattcatcttggtttagcattttttatattgtttatttcagctctcctttcccttttgtgatctaaatatattttctttcaggttattttgctaagtggttccgagctaattttattacttttttgatggtaagggtctaggcagagtagcctttctgaaaggcaagctttaccgacttctccaggttcataaatattaataatgtgtaactacgactctgtgtgctaaaacattgttgtggagattgtacaaggaaggcattttatgatttcatggagacatggagtagcaagaaaatggagcaatgacatttggggggagcatgacatctaaatgttaatattgtgtactgcttactgagaatgagaatttctcttcttttgatgctcgtgttgtcagttgcacgagagtgttcttcaatttgtactttacttcttctagctattttttttctttataaaactgctagaaaagaagccagctagtattttgaataaaagagttgggattgtataaggcaatgtttttactcagctttcctcgaccttttgatgaaaattccagttcaaaataaaaagacacaggcactaccctctgagagagtctgtgtgaccaggctatcattcttaagaaacggattgaaacttcttagtacatctcataaaaaatttagttagctataaatgttttaggctgttgcagctgatatcatttgccttgtgggaaaaaaaaatgaggctgttttatgttaagtgttttgttttctcttctctctattctttttttatatgtattaggcaatgcaaagacttttactaccattgttatgatagtatttaaataagcagaccaaacccatgcatgggactgaagagtaaagtcaagaaatatttgagatgcctcttttaaattaaaggtatattcttcattgctaattttgagttcaattttttactgtatattaaaatgttaatttcaatttcatctatagcagatggtatcctgcttttattttctaaagggattcttcaagtaagccctcagttgtcttgcattatgagtaattagagaaataccttggttggtcctcagggcagagctaaaaatagagttcagtgatttttttctgtaattcttactatttttaaatagaagaaaatgataggcaagaaagaaaaggccatacttaaccaaaatgtccatgacttctttcattactaacaaaaaattgccaagcttgacagtttgcaaataactctcccttctccatgaaggtaacttggaattcgatgtgtgtgtatgtacctgtgtgagtgcatgtgtgtgtgtgtgagagagagagagagagagagggaccacaaagtctctgatgttaacaaatacaagaggaagagcagtagatgagggcagaggtgtggtaagcaattgatctggcaaaatcttgaaagttaagacaagaactctgggtgttactctgagatgggaagtgtttcgactcagcaatcccataatgggtatatattcaaaagaaaacaaatcgttttaccaaaaagatacatgcacttgcatgttcatcacagcactattcacagtagcaaagacatggaaatcagcctagggcccaccaacagtagactggataaagaaaatgtggtacatatgcaccatggaatactacatagccatacaaagaatgaaataatgccctttgcagcaacatggatgtagctggaggccattattctaagcaaattaacacaagaacagaaaaccaaatatcgcatgttctcacttacaagtgggagccaaacactggctattcatggacatatagatggcaacaagagactctggggacccttaggggcaggagggaacagggggagggttgaaaacctacctatgaagtatatgttcagtaccttggtgccaggatcatttgtaccccaaagctcagtatagtgcaatatacccaggtaccaaatctgcacatgtaccccctgaatctaaaataaaagttgaaagtaaataaatagataaataaatgcattaacttttttcatgaaaactaacaacaaaaaacctgagaagacaggccgcaaaaaaagaaatatggaatacatttaacctacaaagaaacaatatccagaatacataaggaacatctaaaagtcaatcgtagtaaataacataaaagcaaactgaaaaatacttcaaacgacattattcagaaaatgtatcctaatggccgataaacattaaaaggtgctgaacattcttaatcatgaaaatgaaaaatagaccatactgagatgatcatttatcatccagtattaacaaaaatctagaaattatgacaataagttttgggtaggatgagaagcaatactgctttggggtatacaattgctttggaaataatttggcattagctgtaaagtttgaagatagacctatttacaggttagtagtaccaatcctatatatgctgtctagaaacttctgtacatgtttaccaggaagcacatataagaatattcctagaattactgaaatggcaaaaaactgaaaaaaactgcaactatccaccaaaagtaggatatatagataaatcaatagactgatagattggcagatagataggagtgctatacagctgttaaaaataactgtaatgcagtgttactcatcaatctggatgaatttcaaaaccaaaatgctaagaggaaagtgcaagaagcagaaaagaccatagaaattattccatttctgtaaggtcaaaacaagcaaaattcagcaacatagtgttttgaaatgcattcatatatggtagaactatagagaattttaggagaatgattaaaagagattcagaataatggtcacctgtggagggaaggagggggctatgattggagaaggtcatgctatctacaaatgtgttgttccatttctcagtctgatagtagaaagatatttgaacatattattgttcttcaaattgtatatacattttaatattttataaatatattctgcattaaaataaaaagaaaataggaatgatatggaaccagcaacgacagacaacttttttaagaattttttttttttttttttttttttttaacgaaagctattgtcttctatggaaaatgttgtttgacctattagcacttgattaggttcccctccttttcctgaaacactataacttttccctatcatgtcttgtactaaatttatgctagctgcaatgctagataacactcctccagacaggtcttagtagattaataataaatgtttatttcttgctcaagtaagaggaaaaatgagattacctataagtagcagctcattttcaaaaggtaattcaggtaccttgtatctttaaatctggtggctctgctattttcaacatgtggcttctaaggtctctgtgagaggagaaagaatgggggcttgcacatgtgggacattttcatgagcaaggcctgcattttcctccatatgctgttgacagaactcaatggcataggcccgctaactggtaatgagctggcaagtgttgcctagctgtgtgtgcaaaagaaaaagagacagatttttttttcaatagctagccattttatccatctactttccaaatatccacttaaatctttcttctttgcttaggacccatttaccaagggtgacagtccagtcccatcaccgttttgagctcaaataacaatatctccaggcagtatgcagtcttctccatccattgtaaatgtgccttcttgcggtcttgcaatctctgaattaaaaagacaagttgtctccctttcacatcttcccctctctccagagtgggagacacataacattcactggtacatggaaagaataatattctgcaggagggtggaaggggtcttttcctagcagttctccttggctcttatcactgtaggctagtgcatagccccatgcctattgtatgactgcactgtgtcagagttcaatgagttcaagtttgtactattccctgttcatgataagaactatataatagttaattgctgatagtattattatattacaacaagctcaagtaccaagtgtctttgactttggctgaaattatgtgcacactaagactagttaccatggtcatcataagctataaatggtaattttttctatatattgtttaatatgtgtgtgtgtgtgggtgtgtgtgtgtgggtgtgtgtgtgcacatgcacacatccaggaaaaattattacttgacacctactttttcttgtaaacaacaatttatagtaaatatggaaggaaatttaaagggtctgtggcttgaacatgttggaaagtcttgctttaaagctccagcagatcctttctgtactaaggcacaaaagctatgatttttcatctgcccagaataataaaattatttacaaaagcactgagaattattctttatatgatttccaaccttcaagcttctgtagaaacattgtagctttgtaaaatgtggtgccttaccttggaaaaaaaagctttgttttgaagccgaggaatagtaaagaaaactgctatgtccctagcattaaaatcttatatcctcacaatgtgaacatgcaaattaactagaagaaactacattttaaaaattgaaagatttttttctgagatgcctttgcattttggttatctcttattggtcaaccccaggtcagagttaacacacctggctctagagtaatacacatgtacaggtgttgttaaaggctgcatgatggtattctgagcctctgctctgagctctgtcctagatataaagaatgtgcagccagctgtttgtctacttgtcctgaccctgttcaaggattaatgaagagatcctctatctgtagtccaatgtctattgggtagggaccagaaatgattgaacgtctttgcttcatgatacgctgtgccagtatacatgaaaatgggaacctaaaagtactttcataagcactttgtggaacttatttcttcctttaaaatgtcctagacaccttattgtcacctcttggctccctctggtttctgtattttcactggtacattggatcaccatggcagagccctaccctgcacccaacccaatagcaggaaggtttaccttcagcttgttccctgtatgctcagtttccggtggatttattactgtttttggttgtccccagaggctggcttatcatgaagttaaggatcttgatgcctcagggcttttcacttacatagaaccttccaagcccatgggtcttgaatctttgctaaatcggtccttgctctgtatggtactgctttaactgaaacacacacaggaagctgtgtccttactttgcacagatgtattattcaacactgtgaatactgtagtaataatttttggtattttccttgtaaaacaaagagaaaagaaaacaaaatacagaattgtgctgcttttattcactgagtagtgtttcaaatcaagctagctttctggcagtgtgacatcatggcttagcaaagagtccttagaattttctaacttttaacaaaatggggaccttaaacaatctattctctgaaaaataatgttgaggtttcacagtaggaatgaaaagggtgggacgattatgatataactaactcaatttttaatgaataatgaattgcagagttaatgcttgtcagaattttccaggaattagggagaaaatgaggaagaaaattttacaagtagagttaagaggaagaggtagatgaatgcacgatcctgcttttattttatgactattaggatagagatgtttgaaacctgctgagtagctggtggaaggggaaggcttcaaggataaatagtagatggccatgcttgtcccccgacacagggaacggcctgcgcaaacacacttggtttgaggatatctgatgagttcaaagtgctttaactactaagcaggtggaatggcaggatataggagtcgtggcggccactgtaaaactcggtggttcagatgtgggtgacatgatttgcaaatataattacaaagtgatacgaactgttaaattggacaagtttagatttaggtgacagtaggacttagaagagacatctctatatttcctatgctaagctggaggtaataggagaacaaactactttatccacccctgaaaatgagactgttttactgatggaaacatcatcgtcttgaccatgagaaaaatccaagctagaatcctggccctgtggtttactagccaagattctttgaggggcattaatatttctttatgtatacattgagactctgtgatgatacctaccgcttatgcttgctgtgagcatgaatgagccaagatgtactgaagagccatgttaaatacctgtagatagttaataaatagtatctttattgttatcaagtaaatggaaagaattcaaaagaagggagaaagagagaggaatagtaaaatgtcatgagagctggaggttatttgaaaaatacatgttaatcaattgacgttatcaatcaagtaatcacgagattaccacagatacccagcttggggacaggaccacagaagaataatttgtgctgcctctcttgacgataactactttggttgaaattctgtatccctcttactttgacaaatcagaatcaagcgtggttgaatcttaaagactttttttttttctgaactaactcttactagttggcacaatagttaaatgtgtaggaggaaaagaggatgacggagaatgcatattttggtttggagagaacaaaaactgccctaggataatgtttgaatacatggccaccaacaagcccaagcttttgtggaaaaacactaaaatggctaaagcctctcagcataactgctttgctaatttaagtgtttgctttgagagtatgtgaacaaccgaattttcttagttaaatttattaaaaatgactgtacaggatggaattggccaatcagacaaaaacagttcaaaattagacgacgtttttcatcacttcacacttttgcagtgtttgctacaatcaagacactgtgcttagatgctgaacgtgatgcaaaggagttaaagatgtagtccttaccattgatttattggaagcaatagcatattacaaatactttatcttgctctacaggtaggcccgatacaagaagtgttggctatgagtaataatttggaggttcttcaaaaaactaaaaatagagctaccgtatgatccagcaatctcactgctgggtataacccaaaagaaaataaatcagtatatcaaagaggtatctacgctctcatgcgtgttgcagcactgttgacagtagctaagatttgggatcaacctaagtgtccatcagcagttgaatggataaagaaaatgtggtgcttatatacaattgagtactctttagccataacacagaaggaggtcttgttatttgcaacaacatggatggaactggaggccattattttaagtgaaataaaccaggcacagaaagacaaatgtcacatgttcttacttatttgtggaatcttaaaatcaaaacaattgaactaatggacctagagagtagaaggatggttaccagaggctgggaagggtagtgggggctggtggttggggaggtaggggtggttaataggtacaaaaaggtagttagaaagaatgcataagacctactatttgatagcacagcagggagactatagtcaataataatttaattgtacattttaaaataacctgaagagtgcagttggattctttgtaacccacaggataaatgcttgaggggatggataccccattctccatgatgtgattatttcacattgcatgcctgtatcaaagcatcccatgtaccccgtgaatatatacacctactgtgtatccacaaaaaaagtgttggaagagtgttgtgggatttcacacaaggcactgcctgggtttgtgtcactgctctgctctcctataccactcttgtcacataagcaagagacacacagtctcatatggagtgacaaattcggaaatggaaattcttttacagttaattaattcaattcagagtgtctcctcatcatcatccagcatttcctgagggtacctgttttgtgtaatgtggtaagcatagtctcttctcttatattcttccaattaattactttttctagagtttaggcccttctgccggagggagatgcctgtgtggtcacaagaatatttttctccctgcctccactttgttttggtgaccttggccatgttagttggctttattaggcttccacttcacaatctgtcaactcgattaacacaggcctccctggaatacctggctgttttgtttaagatgaatctaggaatatgacttgtttcaaatccacatgtcatcttgaaatgagcttgtctgggtctttagggttgaaatatatcccaggcttcttggctgctgatgtatatttactattttaacttcagttatctttttagtctgaaggctgaatgacttcttacagtgatcaacacaaagattatccagtagtctttggttgaatttattgtcttgacttcaatactatctatcagcaatactttgcaaggtcaacttttaaccatttttgttgttctttgccaaacattgcataaaataaaatataacctttcttctaccatattgtaatactgttgtaaaaaattaaatgatttcctactattccagtttattctctgtcaacattcttttcatactaaaaaggttggttttagcttatagatgaaatgtttttctccaaacttatttatgataataacaacaaatacttttatagtgcttagtatattccaggcactattataaacattctaaacaccttctgccattaactcattgagtcctcacaataatcttatgggtactgctaattgtgcccatttcacagatgagaagattgagggcaaagaagttaagtattttgcttatggtcacaagtgattgggccaatgtttgaaccaatcacttgtctgaaattttgcctttaactatttcacattttgcctcactgttagattttagttctttgttctgaatttggaatgcgtataaccatacaagcaaacacaaatttttattttttaacttgtaatattatggctgacctagagcagtgacatttttagtccaagacctagatacagacaacaggagatcatgtgtaaagaaaatagaataaaggtccttttttcttatgcagggccagcccaagataaaattttgtaataggttgaagtatatctttggcatcttttcacctttctctccctctctcaatttttggcactcctcctttcactttcatctattttttgctccactttgattagcagtagcctgtctaatccctgagagtaacccatacatcagacagaaactccaagtacagtgatacgggaatcaatgtaccctacctctgaccctcaaatttctcctctcagattctagcctgagaaaatatactgaaatgcaaaggtttttgcataaagatgttaatcacagcgactttcttttcagtaataaaaatttgaaaactgcctaaatgtacaacattggaagaatggttaagtaaattgtgcattatacaatacaatgcagcattatgcagccattaaaaactatgtttatgaaaacttctccatgacagaggatagtacataagtttaaatgctaagaaaattcaagttgaaagtagtataatatcaactctagaaaaatacatataaaacaaggaaagaaaaagctccaaatattaaatgtatacagattggatataaagtgattatttatagtttattccgttttctaatgtattagttttacaatctagaaaaaataaatgatcagtttttataaaaaccttcattcacaataaattgcaattttttcttaatcctcctagatatattgtcattttcaaaaatgatacttgccaatcccagtgtctttaattagtaggattctaagcagcacaagaaaatatagaaaaagattgaagaagtgtagagggaatatattcaaagtatgtagtatgtaagctgaaatagagcaaccgcaattgaattctcagatcactaaacttttcttgctttacacaaattttatctttcttaattcaattttttctttttcttttgtgctttctatttaaaagttaatgttttgttttgcattatattttttttcctctctgtgttggaagcaaagacagtaatgggaaaaggggacaagaaacggggcaaggatacactgaaggtgatatatatgatatatatatatatatatatcttcatagatggtggaattataaatggattacatatatcagatagaattaagtgtttgcaaattaaggcttgtttatactcttttgcaagcaatattttaaaatctgtttgtttattttttttatttttggaagccaagccagcagttgtttaaaattcatgcctctgcataatatatgaagactacatagatgagttttctggagatttctccttgacacatttagtttctccacgttgcttgtagaaaggatgattccattctctcaataccaccttccaccaggagaagccattttctttcctgaaggtcaacctacagccacagtagaagaggaaaccagttactgtgattccaaatataatttcccaggaggtgaaattccctctcctaaacatgaattggttacaggaaaagaaaaaagaatgtaattcgtaagactgtggagccattttcctaatccaatttctcctgtcccctagatcgatatcatgtgaattgcttccacaggggactgtgctagcagagaggggtctgtggaaagaaagaagcaccgtgctccaatggaccattattattgtttccatatcacagggtccacatatgcatgtaaatgtttttatagtacacatacacaaatgcaaaactgaatgtctaactaatgtcaagcacggtcacatacacccacactctctaatttcctgtccaaggtggtgatctgtaaaagagaggtgaactgtaagagctgaatgattagaaaataaattctaaaactcaagtgcacttaacagtggacgtaatcagtagagagaactaagacctttaggattctgatgcatctgtcacctgtaagtaaactgacagttctgtttttttaattattattaagcatgagttgctatataaatcacatctcattacaacaagccacaagtgactatctacatttttatgcaaaatgaatgctatcctactaaatgagcattgcctaatattgggagtcttttcttggtcatgcagtgatatttgctgataggggatttgacctgtcatagctttcttctagttttgtagacatttcttgttctctacctccctggttcccagcgtgcttatataatttgacaatatcttttggagcaatttgaaaatatgaatctcaggtcattggaatttgtgtattctaataaaaactggcataataattcagaagtggaattcattgaagaattatgggctcccaaatgctagtcaaattattttttatagaggtggaaagaaagggtcattctgtttttatttcaatccccaaagtatagattaaggcagcagtattctaggtcttacacaatcataggaggtgggtaacattgcaggagaggaggaaataatattcgttgactgtttactattggcaagacatcttaccaacagtttaatactctttgcaactctgagccagttggctctctctgtatatcacttttggaaaagctgaaatttgtaaattagtcccaaactctaggtcagagggtaggggagtgaaggaaggtttcattaaataaatggcccttgggctagtaattaaagatgactatgagttacctgagtaacaaggggagggaacagtgttcttagtagagggaacaacatttgcaaagaatcttcagtgggatggagcttaaaaataaggcaaacatggctgaaggacagagagtgtgggagagtactatataagctaagagggaggatataggcaggagctagatcaggcagtgctttgatggccattttaaggaattttaagcaatgggaagcttgaatcaaagactgtaacatgagcagatgtgctttttcaatacattattatagttgtggtgtggagaactgactgtgtggacacagacagactttcacttcaatcatctggatgaaacagtggtagcttagatggatgtttgtggtagagatggagagagatagagagtttggggacgatgggcagaattaatagaattcattgatatgaagatgtgaggaggtgaggaagagaaagatgtttaaggtgacatagaactctgcatcatataataaaatggatgggggtgccgtttatggagatacggaatgctcaaagacctgagttttatgaatttgatcatttttctaaataagtgcttgattaggagcatggatcacctatttggttttgaacatgtatttgccattcctgtgactcatgtaaaagaaatgtgaaaaggcagttggatctggactctagaagagaaatctagattcacaaactcgggaatgagcattgatgagaggtggagaactacaacagttattagccacatccaggagaatgagcctacaaggagaaacagaataatccaatagttaggaggaaatcaggaagatgactgttttgtggaaggcaaggtaattgatgtttcaaaacaattttgttggtttttgataatgtggaagttatgggcaagagaatgcttgggatgctcaaagaccagcaagaagaacagagtgactggagctaagtgggcaagatgattagatttaaaggttgattttaggtgtgatgagaatgcattaagaggttttgagtgaagaggggatatgacctgctttacattgtcactggactacagtgatagacagtgaaggaagcagggatggaagggcttggggggagaccaattaggagactgtgcattcaacattcagctagtatttatttaacatccagtatatgccagatatctgtaatctaggcttgtcatttggacttggacaaggaagaagtaatcaaatttgagatatattttgaagtcacagccgttgggatttgccaatggattgaaaatcgggatgtgaggaggagatgaatcaaggataatttcatggttttttggcttgggcaatagagagaattgcagtggggctgagactggtagccatagacaaggaacagaggtgaatagggagaggagcacgagttcagttctggatttgataaggaaatggtaatttttgtttataagattcttatgaggataaatgaagtaatgtctgtaaaggactttataaagagcataaacacttatcataagattattgttgttactattattagagtgggccatagtgaaaaccagtattctgatttgttgggccacctactgtgttttattcttggctttgtcactaacttgctgtgtcactttgagcaatttattggttctttctcaatctcaatctcttcctctctgaaagtttccaaagtgaacattagagatggaattgactagaagatcaggaagatcccaatcagctgtaacacccctatgatataaggctgattagtattatctcagtattattttttacattattgatattgatattttacttttatacagaagccaccttccaaagtagatttatcatattctaatgagcattgtgaatgatctcatttcagagataaaaatgttgaagggctttaattatatttaaagaaaaacagcaaaaatgaactcttatgatgaaaatcagtcatcaaaaaaaaaacctgagagatgagaaactacaacaattatccaccctcccaacatgtatgcagctattttgaaagaaaacatttggtacctgttgttagattttggaaggttacacacaaacttggaaaactgtctaaagaaaagccaagggatttttgagttttaattacttcttttaaaaagtaaacagtagtcaattaaggagccataacttgtcttctattattaaattaatggaatcatgcagtaaaatatcagtggagactgcggcattcacctggacagacactgctgttttaattatctatagagtcaaatctatccaaacaatcactctcataatgtaagagaaggaaagaaaaactaaaaactagtccatctctaatttttctcatatatcagggtttttttaagtttacttgctcttcttgcctccctgactcaatttcatccctagattattgcagcaatatcagcaactattagttattattttagttcataactatttgttattctttggatctaagttactagtatctagagtggttctgaatgaccaggtatgagcagtgtggaggattggaaagcacatattctgaagaggtgttgaactgaaacacatccttctaggtacttagctgttttgtttctaacaacttaaagatgttaaagtatgttgttcacatctgcctcaatataagtggcagaagcaacattcctggtatgaaaatatgcacccagagaacttaaaatttccttgatcaatgttaacctgctgttgcagccaatgacatatcttttacctagagctagaaggtactaaggatgaaatcttgtgggattcccatgtaatatagtctgaatgtgtgtctctgcccaaatctcatgttgaattctaattcccaatgttggaggtggggccttgtggcaggtaactaaattatagggatgagtttctcatgaagagtttagtactatccccttggtactgtcctcatgatagcgagtgagttctcctgagatctagtctttaaaagcgtgtgatgcttcgcccctctctctcactcttgctttggccgtgtgacgtggctacaccctctttgccttccaccatgattgtaagtttcctgaggcctccccagaagctgagcagatgccagcatcatgcttcctctacagcctgcagaaccatgagtcaattaaatccccttccttcaaaaattaaccattctcgggtatttctttatagcaacgcaacaatgaatgaatacaccatgggatgctgctgatgtttggatatcctctcacttctaatccctggaaagaaaaccttgcattccagagcattccatctaagcagctggaaccactccttaggtaggatctcagtggcccctgtaacaagtactatgattatagtggacaagtacaactgctcctatctattcaaatggaagaatgaagggacaatgttatagttacaaaaagtgcaaaattttattgcaaaacttcctagtaatgattctaattatctttattgaatgtctgccattttctaggcactggagtgggggttgatttggtttcccttatctacctattcaggtagataagggaaatttacgtggaagctgaagttccttactagagagagcattatcacctctaactctgaacccagtgggcactgctagttttgtagttcctggagttgcactctgcctttttttcctcacacttataactacttctccagctcctgccctggacaggcctgcactgctctgggcattctgcccactaatgactagtttttggctcatttcctccagaggctgcacagggaagagtgacctgtgtggccttatctgtaccatagattttctttcttgtgtccagctgtaatcccaatttatataaacatgtctatacctgagaccccagtcttgataccccaacatataacgtcttgctaatcaccctcacatagccctttaagaaggtattttataattaagagacttgaaactgagaggcttacttgcccaaggtgcttgggaatgcattcagatccacactgtgtttactgtactgtgctgtctccatcccattgtacattactcatttgtaattccagctgcttttgtttgagtgactagcaagtgttcaagtttcactcacatgccatactcttagaggaagtaaataacgtgtttcttgaacctcactgtgttcaggaagtactttatttaaccttgcctgcgggttaatgaatccttgctctgcttcctagggctttatgtatgattaaccaatatacctgactatatatttgaaaagttggccaaatactatatctggggcatggggttccactgcactgcagcagcgcgtatttacttgctcccagggctgtccactgttatgagagagagagaattcctactctgcattctaccccatcaccaactgcaatgtgagaagcgaatcacaattattttctcagtccctgaagtatttgctccagaaggctttatttgatgctagaaaaagattttcccataggatcaagcttgtttatggtggttaagaagaccaagaggggaagaaaatctgttagggcaatgtcagcttaagagagaagctgaaattatttattttagcaccttatttctacatacccctctgtttgattagctagacatctaaatccatgcaaagcattgtttatataacacaatctgcaagatccttacagtcatagcatcttcatcctccctcccctatgtaggcttacacaattgagaggagacaactgaagtctcaattcacgtctcacatttcacacaaagaacatcagctttttgtatcatttactctttacaaacatactattgattgccataaaaaattatctctgataacacactcataacatcctatctgttatttacccatctctgtgaaactgattatgagatttttcccaggtgactagcaggaagcaggtctgttaagggcaaaggaggaaggggtacagcttgttttgtgctgaaagaagaccagagaagtcagtgaagtcaacctcctggacacagctttttcccaagctgaccctgttgactgaggaatgccgagttacattaatgatggacactgtctgcccatcatggaaagcggagagctacatgtgtgggaaagggtagtaaactcctcctccacaactgtgcctccttccaagcttagatgacagaatattagtgtctgttatccttacgacatctctccatctggtcctctcaggatttactttatggtctgttttatttcccttttactactattagaaacaaacagctgaaaggattaatcaaaaatgttactgcttcaaagagtaaaaaacatgttacctgtttgactggtgcccatatatagttaagagtttctgaaggaagaagggtcacgcttaatagatttgatgagtccattaagcctggcttccatcttgttgctttgtttgtgcatttatttccattttggtatcttagcagtcatcttcttttagcaaacattgaggtttcagtctattgggtcagggtattagcaatacattaaccaaaccgttgaagacaaggggccagacatattcaaagtgtgatccgcattcaatatcaccattctcttgcaattgcaaagttataggcatcctttggatttttgcagcacttattttataagaaaaggagtaaataaagccacatctctgggatatgctttgagatgtttaagattgggaacattttcaggctgtctcaatactggaaatttgttgtccttttttttcacacattttctccctcttatactactctttaccaaaaggtgggtaaagataaggagatgaaaaaaatgttgcttaagtttttggttgccagctctgttttaagcctgacatagaagggggttgaaatttattttcatcattcagttaagagctattcttggctttcacaaatctcagtcctaattctgttattgtttcagataatgtagaatttgtcacattggctaaaaaaacaactccactaaatcaggacattagttttacatttcactgtgctacattctaaaataaaatgaccatttgtgctggggatgattttagaaaagcgaataagtaatataaagttttcctggttttctcatgggcagcctagaaaaatgccacaccaagactcaagaaattacattctgaattttgcatgaagataagacttgaagaaatcttatttcaacttatactttcctcagtttatgtcctgtaggaggaccctgtagagggggaatgcagaagaccagagggaagaaaatagatggtgtcaattgttatcaacacacgatagtatcacatttttattgagatataatttatatataataaaatatgagagttaaagtattaagttcaataaattttgacaggtgtatatacttgtgaacaaaacttcattaagatacagatgaattctgtcattctagaaatttctttatgcaccttcccatcctttcagaaaattcctcatgcccctcactcctccttctcctctatcactcatagaggcaaccactgatttctgtcactatagtttagtgttagctgttctcgaacttcatataaatggaaacatacagtgggtactctgttgtgcctggatttatttatttatttatttattacacctttaagttgtgggatacatgtgcagaacgtgcaggtttgttacataggtatacacgtgccatggtggtttgctacacccatcaacctgtcaactacattaggtgtttctcctaatgttatccttcccctagactcccaccccacaaaaggccccggtgtgtgatgttccccgctctgtgtccatgtgttctcattgttcaactcccacttatgagtgagaatgtgcagtgtttggttttctgttcctgtgttagtttgctgagaatgatgcaatcccattactgggtatatacccaaaggattataaatcattctcctataaagacacatgcacatgtatgtctactgcagcactcttcacgatagcaaagacttggaaccaactcaaatgcccatcaatgatacactgaataaagaaactgtggcacatacacaccatggaatactgtgcagccataaaaaaggatgagttcatgtccttttcaaggacatggatgaagtgcctggattatttagcttggtgtaatggttttgagatttatctgggttgttacatgtactagtagtttatatcttccattgtgtgagtatgccacacaatggatatttgggttgtttccagtttgggaatattatgaaggtgccatgaacattcatgtacaattttttatgccaattggctttaatgtctcttgagtgagtacttagaaatgggacggctagagcataagctaggtgcatatttagatttatgagaagtggttagttttccaaattggttataccattcttcactacctgttacccactgaatgacatactctgtgttctagccaatgctttaatgtcatttacctttttaatatgttaaagggtgtgtagtagtaactcactgtggttttaaatggcatttctctgatgaataatgatgttggataacttttcttctgcttattggctacttacacatcttcctttgtaaaatatctatgtcttttcactcattttaaaagtgaatttgtcttcttatagatttcatacatgttccttacgtattgtggatatgattctaatatgggaattgtgaatattctctcccagaatgtagcttgccttttcaatttcttaaaggatgtcttttgaagagaataattttaaaatattgataaaccctattttatcagtgttttctgttatcattagttttagcatactgtctaagaactatttgcctatcaagtttatgatataatctctttttttttcttctaggatcttcagacttttagcttatacatttatggcttatataatccatctcaagtaaatcttcatgtatagtataaggtcaagattaatttccttttcatatacatatccacttattctagtacattcatcaaaaagatgtttctctccacatttaattgcactggtgccttttacaaaagccataagtcacttatataagtgtgagtttattgatggactccatattttgttgtctatttgtctactgtatgccagtaccatactcttagttaaattttaaagttagttagcatacgttctctaactttgtttttctcttttaagatgttttagcaatttgaaatcctttaaaactacatatgaattttaacatcagcttatcaatttcttaaaaagctggctcagagtttgattggtattgctttgagtctataggttaatttagggagaattaatatgtttacaacatttagttttgcaacccgtgagtctattatctctctcaatttatttagatcatcactaatttatctcaccaatgttttgtagtttcagtgaagatagcctaagtcttttattaaatgtattcacaagcgttttctagtctttgatattgtaaattgtatagaattttaaatttaactttcaacttgtttttaatggttagtagcagttacttcctcctctgatatcctgaacccctcaaagttacccatgcggattggaatcaactttgtccaaactcttgtaaatgttaatattttgatttaaagtgaaagttgtcctgaatggtaacgcctaggttttcttctagggtttttatggttttaggtctaaggtttaagtctttaatccatcttgaattaatttttgtataaggtgtaaggaagggatccagtttcagctttctacatatggctagccagttttcccagcaccatttgttaaatagggaatcctttccccattgcttgtttttctcaggtttgtcgaagatcagatagttgtagatatgctaccattcaggacataggcatgggcaaggacttcatgtctaaaacatcaaaagcaatggcaacaaaagccaaaattgacaaatgggatctaattaaactaaagagcttctgcacagcaaaagaaactatcatcagaatgaacaggcaacctacaaaatgggagaaaattttcgcaacctactcatctgacaaagggctaatatccagaatctacaatgaactcaaacaaatttacaagaaaaaaacaaacaaccccatcaaaaagtgggcaaaggatatgaacaggcacttctcaaaagaagacatttatgcagccaaaagacgcatgaaaaaatgctcatcatcactggccatcagagaaatgcaaatcaaaaccacaatgagataccatctcacaccagttagaatggcaatcattaaaaagtcaggaaagaacaggtgctggagaggatgtggagaaataggaacacttttacactgttggtgggactgtaaactagttcaaccattgtggaagtcactgtggcgattcctcagggatctagaactagaaataccatttgacccagccatcccattactgggtatatacccaaaggactgtaaatcatgctgctataaagacacatgcacacgtatgtttattgcggcactattcacaatagcaaagacttggaaccaacccaaatgtccaacagtgatagaccggattaagaaaatgtggcagatatacaccatggaatactatgcagccataaaaaatgatgagttcatgtcctttgtagggacatggatgaaattggaaatcattattctcagtaaactatcccaaggacaaaaaaccaaacacctcttgttctcactcatagatgggaattgaacaatgagaacacatggacacaggaaggggaacatcacactctggggactgttgtggggtgaggggagtggggagggatagcattaggagatatacctaatgctaaatgacgagttaatgggtgcagcacaccaacatggcacatgtatacatacgtaactaacctgcacattgtgcacatgtaccctaaaacttaaagtataataataaaaaataaataaataaaaataaaaataaagtgaaagttgtgtgactcttcctttcacttgaaaacttagaggttcctggagggttattaattgttttaatttcactattgttttgtctcagggaatagggaggccagaggagagggagtgagataaggaacagacagtttgtggagcagttagaacacacataacatttgttaagttgaccatcttgcgtgggagtgatttgtggtgccccaaagccattatggtagtaacatgaaagatcattgatcgcagattaccataacaaatataatgataaaaataatgtttgaaatattgttagaattgccaaaatgtgacacggagagatgaaggaagcacatgctgttggaaaaatgatgctgatagacttgctgaatgcagggttgccacaaagatttaataggtaaaaaatacagtatctttcaagtacaataaaatgaggtagcttctatgtccttgtatgtttcatgggactttctatgtgcaccattatgtcttctgtgaataaaggcagtttaacgtctttgacaatttttttgtatagcattgaaaaagtttattttgagttaaaaatgtgtccttgtaaatttcttttctttttttaaaaatttcttctaaaaaaacagggtacatgtgcagaacatgcaagttggttacataggtatacatgtgacatggtggtttgctgcacctattgaccagtcctctaagttcccttccctcaacaggccctgatgtgtgtcattcccctctctgtgtccatgtattctcattgttcaactcccacttacgtgtgagaacatgtggtgtctggttttctgttcctgttttagtttgctgaggatgatagcttccagcttcatccatgtacctgcagaagacattatctcattcctttttatggctgcaaagtattccatggtgtatgtgtgtcacatttcctttatccagtctgtcactgatgggcatatggactggttccatgtctttgctattgtaaatagtgctgcaataaacatatgtgtgcatgtgtctttatagtagaatgatttatatgcctatgtatatatacccagtaatgggattgctgagtcaaatggtatttctggttctagatcctagttatgccttaaacttttattttctgtctaattgctctagctagggcctctagttacaatgctggatagcagtgatgaggtcagataatatagtaattattaaaacttcccatataaagaattcttgatccagatagcttcattaattctctaaatatttaagaaaaaaagatactaatcttatgcaatttatttaagaaaataatggagaaaagaacacttcccagcttgttttatgaggctagcattacttgacatgaaaacctgacaaggacattattagaaaagaaatcatggaccaataatgttatgagcatagacataaaaattcgtaataaaacattagaaaattaaacccagtgatatgcataaagacaaatttaccagggaatgcaaggttagtttcatatttgaaaatcagtagtgcaagtcatcatatttaacagaataaaggagaaaaatcatataatcatctcaatagatgctgaaaagcgtttgaaaaaaaggtaactcctgttcatgattaaatctctcagcaaacttggaatagaagagatatttctcatttgataaaggaaatctataataaacctacagcaaacaacacatataatgatgaaacattaaaacatttctctgtggaatttgatcttacttgcttatactttcattaaatgcatatatgacattttgtaaaatctcagttgctattattgtattattatgacctacatttagttagatgaaaaacacttttctggtacccaacaatttgtcattgccgtttagataccatttaacagtttttctgttgcatctacaagctgggtccacaccagattgggagcacactccaaagcaggacttctctgtttagcttccccctttccatgtttaaaaactttcaactgtcagaaaaatacagggaaaaatgttgtatcatgaaaccaagtaatggttcttctattaactcaaatactaaagtatgactatttgattagggatgctagatgtgagaatggaaataaagggatacaagaggcatttaaaaatagatagttggccggacacagtggctcacgcctgtgatcccagcaccttgggaggccgaggcgggcagatcacgaggtcaggagatcgagaccatcctggctaacacggtgaaaccccgtctctactaaaaatacaaaaaattagcctggcatggtggcgggtggctgtagtcccagctacttgggaggctgaggcaggagaatggcgtgaacctgggaggcagagcttgcagtgagccaagatcgcgccaccacactccagcctgggtgacagagcaagagcttgcagtgagccaagatcgcgccaccacactccagcctgggtgacagagcaagactccatctcaaaaaaaaaaaaaaaaaagatagttctggaattctgagtgtacacagaagataaaggatggagataggatgaataaagaataggagattttgtacatgttattttcttttctgagattagtcttgcctcttgtctttgactagtcaattcctcctcatcttgtttttaatcaacttttttgagataatggtagattgacatgcagttgcaagaaataatacagagagatactctgtatcttttactcagtttgccccaacggtgatatcttgcaaaactataatacaatatcacaatcagaatattgacattgatacagtcatgataaatagcattttcatcactacaagaatccttcattttgtgcttttacagccatgatgacttccctcctgaccccattccctgcttagcccctggcaactactattcctataattatgtgatttcaagattgttatataaatgaaatgatgtagtataatatgtattgaaggtagatagagtgattcctcccacttcataattaattttttcaaatatatttagcaattctaatttttctcctcatatgaattttagaataatctatatatacaaaatattttgctgagatattttataggaattttgttaaacttgtaatgtcaattatgggagaatttacatgttttttatgtagtatcttcgaatccatgaacacaatatgtatcctcatttacttacatcttctttgatttttttttattatactttaagttttagggtacatgtgcacattgtgcaggttagttacatatgtatacatgtgccatgctggtgcactgcacccactaactcgtcatctagcattaggtatatctcccaatgctatccctcccccctccccccaccccacaasggtccccagagtgtgatattccccttcctgtgtccatgtgatctcattgttcaattcccacctatgagtgagaatatgcggtgtttgatcttctttgatttatttcatcagtgttttatagttttcagtatacaagttagaactattgttatatttattatacctaaatatttttattttttgagtgattataagtgttactgttttcaattttggtgttcacatatatattgctagtatatagaaacacaatttattttgtatgtttatcttgtatcttgcaaccttactgaactcacttattagttctatgcactttttttatagattctttgggcttttctaaacagaaaaacctgtcatctggaagtagggactgttttctttctttctttgcagtcagtctaccatttatttcgttttcttgtcttcttggactggctagaacttccagtactatattgaataaargcagtgagagcagaaatgcttgccttgtttctgagaatagtgaggaagcattcagtcttttatcatcatgtgtaatgttagctgtasgttttttgtagatactcttcatcaaactgaagttctcctctatgcctgtgtttctgagagtttttatcaggggtaagtattgaattttggcaaatactttttctatatcctgtgtagttttccaaacttggaaactcttctgcactctagctgccttcacatgggcaagtgttttcatatcattctgtgttcctctgtatgctttgccagaaaggagttcaccttaaattttaagacaatgttgtggatagagaaaagaaaaactttctgtgtcatggaaaagaggtcagaatttgggccaagattttactcctggctcttttatcaggccaggattttactcctggctccttctatcctttgcatagtgagatcatattctctttgagtctgtttcttcatttacaaatagaagaaaaatagctgcagtgatgatcaggtgacttgatagaggaaatgcttagtcaatgtaattggtttatagatagtaattaatgtgagagttttccccagatttttatagwcttcctttatcatttattgctttaccacaataagtcatttgtcaaggaggaacacgtatatttccctagagaacacaccgatwtgagaacatacgaagcctacactcctcattcaggaacaggcaagagacaagtgtacatctagttccaccaagaaaacacacacacacattaacataccagtaatagtaagaaagcttttatggagattctgaaacatctattagaccttgaaagataacttagtatttacatgggaggagacacacttcaacctaccacgttaaaaaagatcccctgagttgtatcctgagctgtcgtagataagtgtcttcacccctctgttactagcctgtgttcagtctagtaaaaagcctgcaatgagaaaggaacaatgacttctttggaaagagaaaagtgtatatgttttggggtgggattaagagaaacagagaaaccaaatgttcctatgggaagctggaacttactcagcattcacttgagaggaaggacaacaagcccctgtgcaaacccctaggaaatgtcagtagagtcaatttctgaaaaatagataaacagcttggtaaagtaagctaaagaataatagtgatacatcccagattttccaggatatttctgattgaaattgtccaattcatttttggtgatgttttaatttttgatttgggaaacacgaacactatacttctatgtttagctttagtgatttttctgccacaagcaatactctagactttagttgagtttttccctcttaattaaataattcttatttgaatatatttatgtttattttaaaaaaggctactgagtacgagattaccacttgttacgatcttgctccttggagcagaacgtgacatctcatatgtatatatacttagctctcttgggcaaaagcttctccctttgttccacatggtcatctgaacattccgtgaagcatttctatcctcccaggatgttttatttcttgttttcatgggtgaagagagactgttttataaaagttttcaaatacttactggatttgtatcctaaagggagaaagcagcaggtcattttttttttctttcaagggcttgctgtaagttggtcttcctcttaacacgaagaaaagaatgacattcttcatgaccgccattgtgagtaggctgtattacattaaagccccattattagcaggctgtgccttggctgattttatagagagctcaggaacagaagtgtagaacaaaaacactgatatttttcactggcacaaactgcagatactttacttgttgattaatttgttaaaatgtgtggcagaacatttagttatcaggtagtcattctgagtaaactagagtcctatgctcctttaacaatggaaaaattatattttcctttttctaatatcccagtgttgtatgtatgctcatttatgttcttggtttaacaggaacattgaacattccctcactttgaatctactctaactcctgtgtttgtgtattttcaccacagtaagccataatatataaaatagtacaattaagaaaaccttagccagcacggtggctcttgcctataatcccagtactttgggaggctgaggcaggtggatcacttgaggtcaggagttccagaccagctttcccaacatgcggaaaccccgtctctactaaaaatacaaaaatgagctgggcgtggtggcagttacctgtaatcccagctactcaggaggctaaggctggagaattgattgaacctggaggcggaggttgcagtgagccgagattgtgccattgtgccattacactccagcctgggtgacaagagcaaaactctttctcaaaaaaaaaaaaaaaaaaacttaagtaatcttcataagtaaatgatatatacttaaatacaaattatcacatttataaaagaaattttctgtatttgtccaacatcggtcaaattccttaatcttataacaattgacacaagaacaagaactgccacccagtccacatttatcttctctatcatatttaagatattgcagggctggagtatcttcttaggatatactttcatcacaacagataacctattacatcagagattcaaagaagtagaatgggagagagaaggagttatattttttttaccctaaatgatgtcatcaagtcactatgctaatggagattgctgcacttgagattatgtgccttacaaaataatttaataatgactttagacagctgatatttcccatatagaaaataagaattcagcttatttatattctggaaagaaccatatctgctgcttagagtgaagcagacctgcagtttacacaacagttgagaataatcttgtttaccaagctctttggataaatagaaaaatatccaccttatcttgagttgctgtggtaatcagctgaattagtttactacttaagctctctggaagatgattggtgcatcatctgtgaagatgactggaatgttagcccactgaagttataacttgtggaacactgttcaaattaccgaaaagagtaaatcaactatctgctggtactcagttctcagggagcagtttacaccttgaaaaatcagatccaacacatactaaccatagtttctcatgttatgatttctggtggaattcctttagactcagccttattcttcaagatactgaatttttgggaaccctaagtacagtttctccttcttacatagagacttgatgttcctaactggtcgcaaacttgggttcatcagaagaatctgctccccttgtgagcacaaataatatctcagtgaagagaaagacactgtcatagaagagtcaacatttatggaatttcctggaatccacagttatcttaaactctgttccactttctctggacaccagctaccttcaatagtgccaggttcagtgtctaaccatggagtatctcatagttggactgggtgagtgcagatgcagttgcatgagattttgaaacatcacattataaaaaaaaattttcaggtatgcaaaaggcaggagagaacatgtactccttaccctgctttaaaaatttctcaacattttgccaattttgtgtcatctattccccccaatcataacattttttgctgaaatattgtaaagcaaatccaaaacattatttcattttacctataaatacttcaataatttacatgggtttttaatggcttgctatttattttcagggtttcttttagtatctttgacctctgtcacagctcatcttgcaaggttgcctatctcattgtcagagagctctagctaaagctcattcatcgttttgtgaactatgaggccacatattctgtgttgacccaagttgggccagaaagacagttttcaagagggcatggcttctaggtctctgccgcagcttgtccactttctttcattgtcagctactagaactatggcagcccatgctgggatataatttttcattgggcacagaaaaagagggtggcgttaggcagaatcaaaagtaggagctaagaaaatgaaaaagacaaggcagaaaatatgccaaaggtgcatatttaagggataaggggaggaatctgtgatgttgaggatgagtccccttgaagtaggggtgcacacaagagtctcccaacttgtgaattactaaggacaccaatggtgaactaatttataatagttgtctcctgtgactgagaaggctgagagtggggattatcagtaagaaaatagctcagaggcaaccaagttgtatggatctttagaaagggaagcaaggaaatagacaaaggacaacttcactgaaaacatttatgaagtattcagtaatgttttaacttctttttaatgagaaacagcaaaccctaaggggaaacactctggggtgtttatgtccagggtcagcaaggctccagggttatgtcttattcagacatattcaggagtaccggggagagagaatactccaggaaataggtgttggcatctgtggaaaggagagaaagtcagactgtatcctagagtcttagggataaatatagagtggaaaacatgaaatcatcttgtgaacacagggcagctattgaggcttggcaggtaggttggggttattgtgaaaaagttcccagcaatccaaagagatgttttatctttgacattgtgccgcctgtgccttgagttagaaaggtacacacacgtgtgagttaagaaaaacttctgatactaaattatttatagttaaacctctagtaaaaccctgaattcaaaaatatttgtagcagaatacaaatattctttttgttttgtcatttatcctggtaaaagtcaagttgctgcagcgtgatggttctggtactgaaatggtcttaggaaagtggaggaggagtggagttacatgtttttaaaaacttgttttgtggctgcatagtattccatggtgtaggatgaagctggaaaccatcattctcagcaaactatcgcaaggacaaaaaaccaaacaccgcatgttctcactcataggtgggaattgaacaatgagaacacttggacacaggaaggggaacatcacacaccggggcctgttgtggggtgggggtaggggggagggatagcattaggagatatacctaatgtaaatgacgagttaatgggtgcagcacaccaacatggtgcatgtatacatatgtaacaaacctacacgttgtgcacatgtaccctagaacttaaagtataataaacatatatatatatatatatatatatatacatatataaacttgttttgtgaattttgaaatagttttacacatacataggcattgcgataatgctacggacagttcccacagtccctgttacctagtgtccatcatggaaagcatataacgtaatcatagcacaattatcaaaaccaggaaatcaacattggtaaatgctattaactaaaccatagatcttttccagatttcagtagttcttacatgcaatcattttcctttatagcatatggttcactgaaactttatcacatgtatagatttgtgtaaccaccactacaatcagaatggagatctcttcaatcatcccaaaggaactctttggtgcagtccctttgtaatcttgtcctttccccaacctaatgcctggcagccactaatctccatcattaaaaatttgtcatttcaagaatgttatatgaatagaataataactatgcaaccttttgagattgactttttttcccattcagcgtaacacctgagatttatctaagttgtgtgtttcagttgctgagtaagattctattttatggatgtaacacagattgtgtatccattcatgtgtgttgaagggcatttgggtttttttcccccaatttggggctattactgaaattatattttactgttttttcctaaatatatgaatctgaaagtgtatctgtatcatttaagacttaactccatgtggaattaatttctagaagcgtgaagaacaggttaccagttctcccaggattgctatgatgactaatttttagctgaataaaatatgaatatatctattcatttttatatgtgtcaagaatgtgctgagagttataggaaaacagaaaggtaataattgttaccaaatcatgaggagtgcccaagttctaaaaaacccacaaagtcaaagaatggtgcatggctatagtttcagaattattttctcagagagtgccagagccaatcttcttggtacctgagggtaaacacccaacctcttgttcctcacttagactttcttctatacttggcttttctccatgaagggtactgtttcagcacattggacagaaaaatacaagcacagtgcaaaaataggtgtgaatgttgtactgattcaggtaccagtatgtgttttgaaagttaactctgcttttctagtgatacttactttggataaaacctaggtcaagcctgttcaaaactgttacccgaaggcaattattcaacattataagcacatggtttccagatcattcatcattttatttaacttcttgagtacataaagtttttatcccatttgtgagtcttgatgcacacaattgactaactgtgtttgggttattttctcttccacattgggaaaaactatctttcatgatctatctcccttttcaaagctgttaaacttttgtcttctttaaatgattttctgtgatgatccagtgtttcttgtcacgtttctgtacctatatgtgctactgttgtgtatttgtttgttcatcctgcctctcccacggaaagacctgtcttctgttcttcgtcaccaagactctctacacagtaagggctccatctgttttgactgttgacctactgaagggacatgcctttgcggacagattcaacacaaggttgaggattaaacccaggcttattttccttcggattttctcaacaatccttccatctcctagtagtatctattctcttctagcaactttttttttaaataataaaattgccttggtcttctaggaccctctgggaaggtaggtgtcaggatggaaagtaggttggtctgatcaagggagtcctgtcatgggaggtgagaagacctgggatctggtactggatttgcttctcactcctaacatgatcatgaaaatattttctgcttccttccttattagcaaaatcaggtagatataaaaggctctgaagcagactgggttgttgtaatggcaaagggggaacytaaaaaattctggactgagatgtgggagtcacaccattgtccactgcagacataccaaacaagccaccttaatttagagcacaggcttgtgagtctagtgatgctgttcaatcatacattttaatctctataaaatgtaatctcctatgcacaaaggtagtaccaatagcacttgagtgcctcgaagagagttttgcccaaaaagcagcagacttactgtatgatatgtccatctgtgaaggtcctggctcagactgagctgacagtatggaagtctactctaatgcagaaaggttggaaacctgtaattattgttaaaagtttagggttgtggaacctatttttatagcaagacaaacttgctctggtattggcccatggatgggtaaaagaaagtaaatgctttcaccttttaaaaaggggaaagtgtggcactgtcagcatggctcagtgctcactgtcatcctgctgctacatcatgtgcttgatgcactgtcatttgggtgataacatcacatttaagtcatgatcatttattcccagtgtcagagtgaaggagtcctgttcatttgagtttcagtattcctcaaactggatttcaaaaagaatttcttccaaaagaattcatcaaggactaccgtaatttcataccaggaagaaaactgtcaaaatatgtcatgagtccaactaaaaacctagctcaaaccatcatagtctctcatccaaactactaaattgacttcctaactaggttcctgcattgactcttgctcctccatagtcggtgctccacacaacagccagagggatcttttaaaattaaaattctgttgaaaatataatacccatcacaaagcctttggcagttttctcttagaagtgcatgcttttacttagcttcaagcaatagtatcttctacctgtaggtcttctctctccatatataagtccttcctatcttttcaaatccagattttacattcgaatatccttcaggagatgtttaatgatccccccagctgataaaagttaccttctctgagttttttatgacacagtatttgtatattttatgccatgtatcagttttctaccttgtatcatagtaatttacgtaccttcatcctttctctactttgaatttattgaggacagattctgtgttttacaaatctgcattgggtactcaataaatatttgtgaaataactaaataaatgagctgtgttaaaattaaaaaaaaaaagaaaaagaagtgcatgcaataaaaatggcttgctatggctcacaggaaccaagtgtgatctggcctgagtcagtcttttcaacttcccctcctgccactctcccctttgctggctttcctccaagtacactggggtttttacttttctttggatcttcctcagggcctttgcacttgtggttgcctctactgggcacttcatattcccccagatttttgcctgactcccctacttcatttatgatcaacatgtaatcactccctcattctttccttattctctatcccttaccatgctttatttttcttcatgacccttatatatcttagatcataatatatatttatttgttggcttatttcctgccttcctgtctagagtgtaaccttcttgagagcagtgacattgtctttttcatactgcatcccatgcctgtagtgtctggcacagaacaggtttttgattaatagtctttgaatgggtgaaagagaatagaggtatctggcatagtcgggggtcaagtcagcctgaggtcaaatccaaatcttgtagattcgggatattaatcatttgttagatacatagtttgcaaatattttctccaattctgtaggttgtctcctcactctattgattatttctgttgctttgcagaagctttttatttaaattaagtcccagttgtctgcaaggaacttagacaagaacaacaacaaaaaacaatcccattaaaagggggctttaaagtacacgaacagacatttctcaaaagaagatatgcaagttgtcaacaaacatgaaaaaatgcacaccatcagtaatcagagacatgcaaattaaaaccacaatgcaataccattttataccagtcagaatagttattattaaaaagtcacacacacaaaaaaacccaacagatgttgatgaggatgcagaaaaaacagaaccattatacattgttggtgggaaggtaaattagtacaacccctatggaaaacagtgtggagatttctcaaagagccaaaaatagaactactattcaatccagtaatcccaccaccagatatctacacaaaagaaaacaaatcattttattaaaaaagagatacctgtactcatatatttatcacagtactattcacaatagcaaagtcatggcatcagcacctaagtgtccatcatggaggactggataaggaaagtgtggcatatataccacagaatacaactcaaccgcaaaacagaatgaaatcatgtcttttgcatcaacaggtatgaacctggaggccattatcctaagtgaaagaactcagaaacagaaagtcaagtatcacgttctcacttatgagtgagagataaacaatgggtgtacatagacaagatggaaataatgcactctgaggaccccaaaagcacagaggatgggaggggtttgaggtttgaaaaattacatagtatgtacagtgttcgctattcaggcaatggtcacactaaaagcccagactcaccactacacagtatatcaatggaacaaaactgtacttgtacctcttaaatatattttaaaaatccatactttggccgggtgcggtggctcacgcctgtaatcccagcacggaggccaaggcaggcggatcatgatgtcaggagatcgacaccatcctggctaacatggtgaaaccccgtctctactaaaaatacaaaaaattagctgggcatgatggtgggtgcctgtagtcccagctactcgggaggctgaggcaggagaatggtgtgaacccaggaggtggagcttgcagtgagccgagatcatgccaccacactccagcctgggcgacagagcaagactccgtctcaaaaaaaaaaaaaaaaaaaaaaaaaaaattcatactttactagtgggcgattattggaatatgaagcatttcagtttaactttgtaagctttagtctttgtgttttaaaatgtgtctgatgctgtcttcttcatagtttgttaggagcactaaatgaatagtagaaagcctgccagaaagtgatttagtctgaatctataaagctgtttctgagcactgactgtaaagtgcactagaagctcaaatttttaggttttgtcattttgtgacaggttgatgtggaactcgaggggttggccaaagccctcagagggttgtaggccatgaaagttcgagaaccactgggccatgtccatgcaaaatgaaaaatagttaaattgaaaaacagatgtccttgtgcctcctaattcccagcaggggctcttgtctgaagcctgagatggctccttgggtttctgtgaatgttgtcaagggcgccaaggatgccggacttgcatttagatgcccaagcctctgtgctggaaatgatgggaaaaaataggaactcttgaacttgagcaagtattagaatatgtgaggtaatggagaagcctcctccctcatgcccatgctcttgtcaggcctgtttgttaaggtccaggccccacttcccactttttttatattattattatactttaagttttagggtacatgtgcacaacgagcaggtttgttacatatgtatacatgtgccatgttggtgtgctgcacccgttaacttgtcatttagcattaggtatatctcctaatgctattcctccccctccccctaccccacaacagtccctggtgtgtgatgttccccttcctgtgtccatgtgctctcattgttcaattcccacctatgagtgggaacatgcggtgtttggttttttgtccttgcgatagtttgctgagaatgatggtttccagcttcatccatgtccctacaaaggacatgaactcatcattttttatggctgcatagtaacagcaggttctggagaggatgtggagaaataggaacacttttacactgttggtggggctgtaaactagttcaaccattgtggaagtcggtgtggcaattcytcagggatctagaactagaaatacacgtatgtttattgtggcactattcacaatagcgaagacttggaacccacttcccacttttgtttcctttaattgcccttatgagaccacatccaaaatcccaagtcctgccaagtgaatgcagtacttaaagatttgactactggatgtctggtcttggagaaaacagtcaagagctggagcaagacagagagcagcatacctgtaatacagcttattaaaataatgcaaacacttctgtaatatgtatgaggtgccaggtagtctgccaagaacttttcatctattaatttgtttagtctttacaactgttcactccacttcctgttagggagatagctgttgttggacccaatgtagagatgaggaaacactgaggaccagagagtaggcatccaaggtcacagagttgggcatgcgtggggcagagccccaggctcaggcattctggatcccaggcccatgtgcctgcatggtagagggggagctggcactagcccttgtgcccccaaatatcctggctgcattgttcccctgttcttagttcatttgtgttactataaaggaatacctgaagctgggtaatttataaagaaaagaggtttatttggcttggaggtctgcaggctatacaagaagcgtggcgccacatcatctgcttctgatgagggccttaggaagcttccacccatggcagaaggaaaaaggaacagatattacatggtgaaacaggaaggaagacagagcgggggagatgccaggctctttttaacagccaggttggcagggggtgtgtggggagactcttgtgggaactaatagagtgaaaactcagtcattaccttgaggatagcaccaagccattcatgagggatccacccctatgacccagatacattccaccaggccccacctctaacattggagattaaatttcaacataaggtatggaggggacaaatatccaaactctattatccccataaatggttaaactccgggagagacaactatgcacctctcaatcccaaggtgagttgggattcacgattggttaaaacttcatcagaaccatccacattggaaatcacatctaaaacttgagtaattttatggtttacaaagcatattgacttccttgatttattcatgttgccagctgccctccgaggcagaggatcttttcacttttctcctattactcaatgccactactgagcctctgcactgaccctacggcttcctgtcgtactctctgcaatgctacatgtcccttctagtctagggcgatcctggtggaagcatgaagccagccagcctctctctggtcaccaccatcacttcattccttatatataccaggcatgggaatgtttcttttgcttgttaatttttgttcttgctcttatctgcatttatcttccttcccccaagtgtactgccagaccctggagaacagggaggggaattgtttttcctttattattctttcctcagttcctgctgtagaactgtacatctagtcaatgcttaataaatgctggtaagttgaattatcaacactgaacgtagaaatgcactgttgcctggcttgttagttttgtaagaatagggataataatagtagcaactaatgtgtacagatttgactatgtgacattatttaagggctttgcacacattaatccatttaatcctctccatgacctaaagcactgctatgctgaagtgcattttgcctatggagaaatgactggtttttgggaagccaatgtgcagaaggccttgtttcactacccctaaaacagtgcatgtgcaggaggactgttattgctgtgctttggaaggtctgtggatgaggaaatgtagaattgcagatttatgggttggaagttgatttagaagacacatgtaacagaagtaacaatcttatcagacttaccagtgtcttccacttatttccttwacttcagatgctcaggaacgacagcacytgcagaatgcatccactgctgaaaaatgagagctgtttcttgttggtactcttcagggacattttagcatagtggtggactccagtgttgacttttcttttcatcatctgtttgatcttggtggattcttaagaatctctggacctgagtttgttcatctgttgattggggttcatggtagccacttctcaaggttatgattgaggtgaaatgagatgctatgtgtgcaaaggacctggtagcaagaatgacatgggaaggagggcttgctcaataaacattgcctgttatagtgtgctggcattaccttaaaatccttaataagctgtaagttttggatgagagtcagaagtgttgggttggtgaagcattttgctacagattgcaggcttttctccggtgtcacaaggcattgaaaacgcttgttcggagacagcccagaagggaaaaaaaaaaaaaattctggaaagcctggcattttgtgctatgttgtgagtaagacatttatagttattgagccaaaatttccactgtaatagaaaaagcagttgcttttaaacttctggtccaatttagtaattatgggtgagttaaaatgtaggccatttgaattggatttggaggatcaagtaagattctgtcctacagtggggatgactcatagaggaggtagcttgacatagtggaaatagaagctgataaggagccaggagacccaagttcctgtcctggatttgcacaaataaactgtaatagcctttaggcaaattattaaacatctcagttttctattatataaaatgagagggctgtgtttgtgaatggatctttcaacatgcttaaggttataccaaacagatcactgaaaatgaaatatgttatctacagtcattagggaataaagtattcttgctagtgcaatatacttatttggagaggattacaacataaacaagaaccaacgagaatacatcagtgccagaatgatacagacataagcagacacctgaggctctctgatacccgcaggtcattgctatgtcctaggaaaacatagccatgctagttataagagttttctgatgatgagtctttataaacagaggatttactgggaactagagatggaatttttaaatgatttccatgttatggatgacctgtacttgggcttatgatagctctgccacatcttgagaaataatttattgactaaactcgagttggcaaatgtaaaaactcatttgggttagctagcttgtttacttgttcttggcattctttcttcttcttatttcagttgtaggcatgaagccacattttgggctgatcatctttataataggcttatggttttataacatcagattttgaatgatagcattttctgctctctgtgtttcctatcacctgtagaattaagataggtcaaatatggaacagatggattgaatgattccctagaattattcactgacattataagggtgcctcctgtggcacaaatagaaatatttctgagagttgtaaaaattaaatttttaaaaatcgaatccaatttttctattgacctgcgttagaatttctgagacattctatcttcatttctgattgattttcaattagcaaaggttcctgccattttaactttaaatttcttagttcccctttttcctccaagtggttaatgatctgtgaacaaatattggagcaaatcagagatgcttcagtgtacagtcaccctatagatatttctggtgtgcaagggagtgagctacctgggagatgaggaaccttggttctagtgttttctctgccaccacagaggtatgcatctttgaataaggtctttttgcctgtttcaggcaccattctctcatttgtaaattatgagctccattgatcctatctggcttcaatattctaccgacaattgagtgggaaaaggaaactttctctgaatcataatctctcaacttttcttttcataaattttcttaaagtggattatacctatctgtaagtggataacagcctccatttattatccttatttttatttggctttttttttgacttgcaaattcctttttggatggattagattgaaaatctttgggaggctcaatcagcccagacagatttattcattctttattctggatgaagaagaggaaatagtttaagatagatctgacatggaacattaatttgattgaagcctttctgtgtgaggagtaattgtagcatcttcattgtcataatggagagattagcatggattagattagcttgtgtacaaaggttgtacaaattgattgctgtgatttgtaggctgggctgatctttatagtcactggcatgacttcttaagcattatagtcatgatttctttcatgtggtttacatgtggcaacaagaaaagcacatttccctcgttaccaaaaccttgtgtctcccaatgggaacttgacatagactcaaaaacataagacgtgtacatataatattaaggagatggcactggtcatctggcctgctgtctgggatgacagcacacattggccaaagacagaagagttcccaaaacagatgttcagagaagatggctagaatactgttgaaatgtggtctagaataattatgaacataagcctaaaaaggtagccaagatatggctctgaattatagccagtcatgggattattatttaactccagtttagtatgtttcctgccaagtatgtgccagaccctctgaaacagaatctggtttttgccagcagtgcttagcaactctatattttaagtctaaattccaaaaaaaaaaggaagagtaaagaatactaaactgctttctgatgggagtaagttgtatttcaagtggcctcagaaatctttttctctagaggagactttctgtggctaagaggaagagagtgggcacttctcccctccactgaacccacctggacttggtctctctcccaaggctttcactgcaattgaaaggctttttcactgccctaggtctctctcctaaggctttcactgcaattggtacatgtgttcagtgactattagaacttaaatgatcactctcatcccacctcactgatctcattttccaaatttctccctcttgctctcccattctagggaatctggccttcttcttggtcttcagatgcactgaacatcttcctgcttgaggatgtttgctgccttaccttactctgctggaaagcaattccttccaatggtgcaggtctcacttccttacttccttcagattttcgctcagataccatgttattcatgaggcttccctggccaccccatttaaaagcagcaccccaccagcattgcctatcacccccaccctgctctgtattacctgataacactaatgaccgtctggcagattatatctttatttgcatatttattatctgtattctgtctttagaatgaagayagaggctttattccagtgactgaaacaatgcctgacatgtaatggaactcaataaataattgttgaaataatgaatgaataaatgattagcctttaatttgtattcattcgtacacattacattggggttttctagaagacagtatgaaaatttcacttaatttgtgactcaagtacagaaagaacgatagagatcagaggttcttaaacaactatccatgaacccaacgctgtgctttacaaaatttaacgtgcatgtgaatcgacagaggatctcgttaaaatgtgaactgtgatttagtagtctaaattggggtctcgggttctgtgtgtccgacaggctcacatacgatgcggatgttgctggttctaagattgcactttgaggagaaagactctaaagtacctgtggaagggattcaaggggttcacaaagccagggttatgaatgtccagtatcattgttatagcaaagaactgaagtgctagtttctagaaatttctggtttatgcaataccaatgaacagatcatttattggacattcattgcagagctttcaactgttaactatgcatggttgttctgtatgcagacataaatataggtataggagaatttctttttctgaggaaataatagaaaatattcatcagtttgtcaaaaggatcagtccaaacaatggtgacagccattgttaatggatgatggcattaaacaaaagaaactttaggtatcaaaccaaaacacatcataaccacatcgtaaaagtagtgacaaaaccaacacatatgtttgcaaataccttgggaagattgtgttttatagcaatagtttttttgctaaacaaacaactaacttttaaagttaacatttgctggagatgatattttcccagggaagtatttaaatgcttggaacacacctatccaaagacaaatatttgttttcccccagccactggaaagagaccccaactggaaacattgtctagaaatgaatatttggaaactctgaggccctctataaatgccattgcagtagctcactgtccttctaagctgaggccaaaatgccctcaaaggggccttggtgtagaaaagctgttttcaggcaaaaaaaaaaaaaaacaaaaaacacaacagcccatcaagagctgcatagcttttcagtcaggaaacttacccccaggtggatgtttctcagccaaggagtgtgggcaatttagtttcaaaagtaatttggaacaactgagatgttttatattaaatggtcctactaaatagacatctagcacagggcttagccaaattctagaaggcctcgcatggtatggtatcacgatcctcataattgctaaaaatattactcataatcataatggctaacaattattgagtctaaatatatgctaggcaaggtgctactaaccttccatacattttcttatacaatatttataaaactaattcggatggtactataagtttttttgttttgcagaaaaggaaactaatgcatggatatgtgatttatattgctcaaggtgacaaaattgttgagttgtagaattgggactcaaattcagatatgctgattccggggctcatcctgctaatgactgtgctgtactcataatcataacaaattgatttttggtgaccttgaaaccctgcttaggaaactaaattttaagattttggttgaatttaccctcagggtggagaaaacacaggttttcataaacttactgtcatcaaattaactatcctatattatttttcagaataaacactcactacttgttaaggaaatcatggtgaaacttattcatatgagctaagagcttctgcattcccatttcatggaaacgtggattttccacgtgtggctctgtagcatggcaaaatagcttggtgtgcaaaaataccctagggtaaagataaatgtaattgtttttgaaatcaaccacttgtccctaatgctcaatctgtgcttctgagaatttgccgagtttcaatgctttaatgtgtgtattgaacagggctttctgttgcaaatagcagaatttgcacacgctagttgaatcagaaaacaataacgtaacaacagatactaataaacacgtagaatctcrgagagtgccaaagagcagggttctggggctacacagccacaccttaggacttctctctaatcatatgacttctcagcacctgtgatgccaggacttggcctcccaaagctgaggaaccaaatgcctcaccaactgctcctgccagaaaactggttctccctggtttggtgcccatactctttgaattttctggctttaaaaattggactcatggtgtgagaaaattccaaaatgtaggaagatcttcaaagatgttgagcagtcaccacgaggaagcttccaatgttgtgtatttcagatcagtgttgtggagtatctttccctttatcacacttttccttcatttttactccctttgattgctaaatctttacagagagcagggactctgttcattcagtccccagaatggcaatgtgttaagtccacaagaaggcttttcgtggacttttggagtctgatcataaaggagaaatatgtcttaaaaaggcagtggaggtgatgtggtgaattttgtgcttagcatttttaacttgagaaaaatgataagacaggccagtcaacacacaatgggcaaatggagataggtgactgtaattcagaagtgcacacaggactccaggtttgagtatgggagttgtccttcaaggattggcagttgaagcattcaccagagcatggatgtgttttctgagcaagagctgtcaataattaggatagaaaactgaacgtggaaccctgaagacctctcaccctgtgccaaagtccaggtgcagaaaagaaaggtgagcttgtgataaagagcaggcagagttcagaagacagccatattattttggtgtcataggggttaaaggaggcaattcatgagaattgattgcttttttctcactctttattgagatatagcttctcaaatgtaaagcatgatttgaaagagatcagtaacaacagttatgcattacatttgaggtgtgttttgtacttttcaaatttgttttcaaatccccatcacttcatttaacttcattcagacacttaaattgaaaattactttctatgtgtggttaaaaaaatcttgcattatttttgtttttttctttaatctaacttaaacatggaagaaaattcagttgtgtgtagttaatcacaggtttgaagaaattaccttaattctattttgagaaagaaagagtatcatgtggtatacagagtgaaggcttggatacctccgttgcacaagtttcctgcttagctgggacctggtcaggccacttcacctcccatttaaaacatcctttagaactaggtatggagctaatgttttagatatgaaaaataattattcacagcgtgttactataaaacatatgttcatagattcttacatttgtatacaaaacaagaaatcacaaagctttattcatgcagaaaaaattaatttgaaaaagcccactgtatgccaagaaatattcttgatgcttggaggtttggggttgaggtagcaatggggagataaaatgaatatggcttgcttcttgctttctgcaaagaattgagtttcgattctgacttaagagacataaacaaggaaaagtacattctccatgctgcatatgtgtggcttaggccctggcttgatgaagggagatttggtattttgttaatgtaggaaaaactaaaccaaagtgtcttttctattctctcatttaacagtagtcaacacagaagacttctgtgacctctagtcaccaagaagtgtgtggggatttctcactaccaacaaataaaccatcagttctgcagctgacactagctgggtgtcctctaattcaatgctactctgacactgtctacctggagatacagtcagatccctcagcttgagagctcagtccctaagactgtttcctcccctcactgcagatgccagtcacaagctccagtttgttgcgtctgtgcttccagccagctggctataaattggggttccctcaacttcccccttgggtttgattaagttggtagagtgattcacataactcaggaaaacacttacttacatttaccatttaccagtttattatacagaatattgtaaagaatacagatgaagaaatgtgtaaggtaaggcatgggtggtgggggacagagcttctatgcccttcctgggtgggccgtcctccaggaaactctgtatattctgttacccagaagctctctgaacccaatccttttgggtttttacagaggcttcattatataggtgtgattgattaaaccatcggaccctggtaatcaacttaactttcagcctctctccatccccagaggttgtggggtgaggttgaaagttccaaacctctaatcatgatttggtctatccagtgaccagcccccatcctgaagctacccaagactggcagccagcagtcaactcattggcatacaaaatacatagtttggaggctccactgattttcagtgtggtaccccaggaaagtggatgaagaccaaacatgtatttcatgaagccttctatttcagtagtaagaaaaatactaaattataatacgaatttttttataccagcaaagcagttgcatttgcatctttaaaatgcaagtgcaacttctttttagagatctattgcattttaaagatgcatttcatcacttattacagccaaatgacttgcccaggcattagattttctgttgcagtgatagcagggatttaaataatgattatcttctctttgacctggtgaatttcttattaccctgcatatagacatggttggattgtactgactttgcaaataccacacaactgaagttggatttctgttgtccttcaatcaaccatctacctaagcctcaaaccgttttgttttgcttaaaaacagaatgagtttggcaaacctagaaaagtacacaaaggatcatccatggatataggatggaagatgtatgaatatggaccaacaacagtgtttattttaataattctaatattgttataagttgtcataagcttaytttcgtaattagagaatagtcttcaatttacactgaatgcatgtttggcaaatatactaatgttatatatgtacttctcttgttcagggcagtcacttgttttaagtaacatgtttatctttattaaaatatgaatttcatgcggttttacagcaaggttattggttaaatcaatattctcaattaatgaaactagtgacatcatcatcaagagcaatagctagcatttgttgaatcctgactatgtgtcaggcattattttaatcacttcatatattttaactcatttaatcttcacaatggctctactatatagaaacatgtattaacccaattttgccagagggttgagacacagagattttagggaacttaggcaaagttacatagctagaaattacagtcagtgattgcaaagcttgtgctcttaacttctattttatcttgtatctgtaaagatatttactaaccaagttaagtgtccttagagcatatttttatagtataaaaattgggaaaaaattaagataaagaaaaaaacccataatcctactgctgaatgagagctctgttaacattttgaggtacacatatttaggctttttccctcctttacatacattcacataatttgtattataaatgctcttttaaattaattttattcaattaatatattttaaaactttccccatggtattatttcattattattttaaatggctacattaagatatggatatttaggcttgaaataagtttaaacaaacctattgtcttcttaaatctccagtcatatttccatgaaggatggcagctcttagaagtcatggaagcaaagaacagtacccctcaggaccattgtaagaaaatgtcttctttgagagttcttaagactattagcacatctgaggacattttcctaaggattcatcttggtgtaaggacacactggggatattttaatttgtagtgatttgttgttgttgagcaataaacagtatatacctcttgaatttgctaaggaatgtgtgagcatacagtgctggtaacactacattagttaactctctttacctttcaaaactgatttaatgaaggtattttaatgccgtttcatagataagaaaatgaagtgcaaagtagttaacttgactaacaacaagtaagtgaaggagacataatttaagctttagcacagacaatctgtctcttatagtgaggcagtataacaataaatatgtggaggagatttctaaaatttccagtgtatgttaagaaaacaatgtattttatgatgttttagagaactgcccattataaccaactgataatgaaattcttcatctttccatgctatcatatttttcccttgtcagcacactgacctaggaatcaagaaattttggttctaatactcgcatttccacctttctgggtctcaagtttttatctttaacataaaaggttagaaaacttgaaaatcttaaagtctcttcttggttcagagagattagctttatggagttgtagagcctgtgtagaagctttataaagtggtttagagtcaattgacctcattggagaaaaaaagtagtcagtaagttcttcacctctgcaaagtgcagactgaatgtggagaacagaattgttgttttcttagctgtggctgtagcaggctgttactgattaccctcataagatgttttgaatttgtcttggaggaggtggctttcagcctgactttcaggctggctttgggtcatcctgagtaagaacaagactggtagtatatgctgccaaatgtaaaattatataactgcccaggagagctgtcacacgtggaggatactagaggctgccatgacaatattagccaaaaaatgataaaccacaacgtgatagaaggaagaatcctcactttatagttgagccccgagtaagtgaggaaagttgtgcaagtttgtaacttcagtgtgatggttgaggatggaattaaagtctcctgactgcttatgaaacctcccacctatatgtktttacgcaaaatgtcatggcccttacatccttttgtttccattgctatgatggttctggattgtaatcctataagaatatgatcacttaatgaatttatgttcattatatttcatatgcagcctgaaatgcctctggtttctttattagcaaatcaacagaaaacacttgataaccagattcaagattagacagcaaagatctacagaaacagattaatatcattttatggcatactatgatctttttttagggaattaactaattactgctcaaggaagcatatccaataatatgcgggtaaaaggatataagcaaaaaggtagcagtaaatagctgtgttttggattccacaaggcttgtgttaggtgaggtcttattcagcatagttatgatgtggtaaagagagtacattgcccactaatacacatttcaggcattataaattgggaaacttgcaaatgcaaataagaaaggatgggtaaaatcaatatgcttagtgaagaagggatcttaagaaatttttttagaaaggatatgggaccctaaaactattgaagtaacaagaaattaggacaagaaactaatatgggaccctaaaactattgaagtaacaagaaattaggacaagaaactaacagtgatagaggaagggtactggcttgttagatttgggctcaccgtttggcaatccatctctaaacccyatcacaacttatttataataataatcttggtgctgatcatcataatctgggtatgcagatttacctacataattttaggcaaattggttaacccctctggacatttaattcctcatctgtgaaggagttacacaagaatacatttattggtttaaataactactgttcaatagagaatttttaaattagcatctgtagctctgttaggagggaaaaatgatgatgttttatgatttcaacacatgacttcatttctttgagctatgtgacagtcatgctttcctccattattcatcaatactccccactgcttaaagttgcaaatatctagggctgggctacacaaagggaactgagagatagcccacccttccgtgcaaattttattgataagagtgatgtggtccagagacatgagacaccttgtccaggggtggttaatggtggagcctgaaggatgagcaggtcatgattctcagcacagaactctttttctcttgtagaaaagatagcaaataggctggatgaggtggctcacacctgtaatcccagcactttgggaggctgaggtgggcggatcacttgaggtcaggagttgagaccagcctggccaacatggtgaaaccctgtccctactataatagaaaaattagccaggcatggtggcatgtgcctgtagtcccagctaccgggaaggctgaggcgcaagaatccattgagcctgggaggtggaggttgcagtgagctgagatcacatcactgcactccagctgggtgggagagtgaaactgtgccaaaaaaaaaaaaaaagaaagaaaaaaagaagagatagtgagatagtaaataggttttcctcctcatgccaactcagatcagttgatagtacctgccagttgagaaaatttgtaaggacgtagtacctaggtactacataaaacactattgctattaataaataattatcactatcagtaattattcattagtactgtctgctatattaacaccatagggaaatagaaaatgtttgccacctcctatcaagaatattctttaaacatattccttcaagataaacgttcaatatttattctgcctttcttgtatctctgtcactcacaatattacctaatgctatctaatgtattctgttcttagagaagtaaaatgtctcagtagaccaaacttagatttgatcattacgaaagatgtcattctcagtggctggatcttcatgaggttttcttgagctgtttttcatttcacctgctgctggatgttttaggctgctgtattcrcatctggtggcctgtctcactaggatctcatggctgcccgggcagtgtcacagctctgagttcaggttggctctagtcttgcccttcgctacagaatcgtggaatacagtgggagatgaagaaggcagcactcttgccctttgtgtttctagtaacttaaattcaactcctggcagcctacttcacattctgatttgggcttctgatgttgagtgctgagggaagctttctcccactgcttacatgttctagctccttggttggctccaaggagttgtgatggaatttcttggcatacttcaagccagcagcagccaggttggccttttccctccacatcttatagctttgtaggattttgggagaaaactgacctggaactagttacatgacctttttcatttatttgggtcttagtgctcatccttgtcacctcttattatttagaatgaaaagcacattactctttaaggaactagagtataaattcagaaacctagaacacatatattaatacacagaactttttctcttttcctagctgttcaaatgtaatacagttttatgttcaaactaaatgaatgcctatttattcctggaagtaaattttgttattttctagtccaggctctttgttttacacatgacaaaatagaagcccagtacacaggagggttgaatgacttgtttaatggcacatggccaaagaaacagaacagaaaaaaagaaatcagaatttgtcagttttctgtctagtgcattccaaatcacatgacacaaccattattggttttagaattggaaaagtttggtttattttttaactgactactcagattttaaaaaaattgtttcattaatagattagtaaaaatttaatactgctgttcattgtagggcttagtaagccattactatgatagatctttatttttgttttctttaagtctgtactggacattgaagtctctctatggtctctggacttacgtcttggccttacagactgtcctgtttcacctttgcctcagtctttgcagtaatctccctcactgagaagtctggaacatgccacatgttcacagtgaggctgttaaaacttccagccccatccaaaacctagacttggaaaccattgtcgcattgctttctgagtccacagatagcaaatgtgacaagtcaaaaatgatgcctaatgttgagcaaggagtctttaaaaagccctactcatgtttctaattctcacacccatgtaattcacaggcatctgtccacaggtagtttgagaacctaactatattaaatttcaatattcagcaaatagctcataaccaatcatatctgaattagaaaagcatgtgtaaagaacaatagcaccaactagcactcatagcagattattccagctatgttataataaggcccttggcaataactcaaggtckgttttttcaaaatgtaaggattaggtgttcttgaggcaggaaagaaaaacaagactattctttgcagatggagaaaaaaatgaagtagattcactagcagagtcactttcatggaaatttggagctctgctgcacagttttagtgtttaaacaggattggaagtcctttgggatgacattttcaatgctgaaagagaaacacctgatagaattgagtctcaatgaaacagaaaacctgctgaattgaaaaggggcttcactcagtgactaattttctaaagtgagtaccccaaactgttaataactattttaaagcagttggatgactacattcaagataaaaaattatatgggaataaaaattgtcaatatatctgattttggtaaaactaagcacacaatttaaatttatcttggaaaaccttagtagttattggaattacttgagaatctattgcaagcaatctaaatgaattcttccaaaacatgtcactggagcaggtactcaagaagtaatctgaagtaaacaaacaaaaacaaagctatatttatccttcctcttttctgtgtaatayaatccatgggaagacaagaagaaatttattttctacttgtgagatttggggatgatgatgctttttctatccttatcaccatttgtcaagatacaactttcattactttccagtaccacctttgaacagcatcttcttttttagtatattctcccttcctccttccatctctccattctttcttccctcctcttttcttcccatatttccttccttccttctttctttcattttctctctctttggaatctcttctcttaactttatgttttccccaagtgatcagctgtttttatacttctctgctggttcctcctaacagagtctttgcagattttaaagtaaaaccataaagaagaaaacataaatagaatcttcagtgatttcacagcagaaaggcatggtttgtattactttctctcagaggtatttttaatggggtaaatatttatttccagatgacccaaatctctttgttatgtttgctgacagaaacagcagctcctccttctttctctctacagtaatgagattatggacagggatagaccttcttcatactgctctgacaacagacattttataaaccagggacgggctatttcaattcagtttaattcaaaaaaataattattggatacttaccacatctaggatattgttagctgttataaatgatacaaagataattaaaacattgttcttcctctcaaggaatttgtaatctagtatgagggaaactgtgtaaataaatatccaatcctggatgactgccacaacataaaaacacacaaatgtttaggaactcggtagacaagcaaaggaagtagaatagtaaagatgaatgtctcctatttgtcaatattttacttcacctctgtgttgttttgggatatatcaaataatgtcttttaaatttagagttattgttactttataataattattattattgtcataggtagtgttaggttgtgtcatttatgtaaatacttatggagtagtaacatgatatagtagtctacctcagaaagagatttattgagtctatgatgctgaattatagttttgtaatatgtttctaaattctttatgatggagtcccactctatcacccaggctggagtgcagcagcacaatctcagctccctgcaacctctgcctcctggattcaagcgattctcctccctcagcctctcaagtagctgagattacagtcatgcgacaccacaggcagctaatttttgtatttttagtagaggtggagtttcaccatgttggccaggctggtctcaaattcctgacctcaagtgatacgcctgccttagcctcccaaagtgctgggattacaggtatgagccacggtgcccagcctgtaatatatttcattccaacttttagatagcttctttatcaggtgctgcaataaattgtttgccctagatcgaggtggggagagagccctcttaggatgagctgtcacacagtaaaagataagatttcctggatcagttttctaaagtgacaggcgtgtcccctaatcgagacagacagtgctccattttgacaaataggccagacttctacgtgtgcatatttgttttgtgtgtgtcasagtgagggtgaggttgaggagtcattctgttcttattggaagtgaatcaggcataaaagtgatagagcgcttgaatgagatgattgcagttgaaagacacagcaattaagcagatttcagactttagagagcatgtcttccgggagctatccacggtactgaactgcttctccctatattgtcctgtaaccccgcaaaacaaaccttcaaacattttaaaaccacaagacattttaaaaactggctttggttattccttackagacaaattctctaacctgtgtatttctaatacttgttatttgtttaatcttggctaggtcarcccatttttttttgtttgatattacacattcatccatttatttattcaacaaatatgtaggtacaatcttccgtatgttgggcagcctcctagtggttaaggtgcttaggtttcttattatgtaatgctaattattattacttttgatttttctgggatttactctaaggaagcagatttaatgattaaaataattctacttcgtgtgtgttgtttgaagaacttggtttctggcccaaagatgatgctttgtttacagtacctagaacagccctttggcgtatcgtagacactcaagaaattgtattcacagcataaacatgtttattgttgtggagtgattttctatgaaatgttacaaggaaaatatatattttaaaccaacaagtaatctttgcaaaaaaaattttgaataagaaaaatattgttctaagtaatctagatggagcatacacctagccttaaagagtctagaattgacatgttgggacattctcatatgttaagaccacattacaggttgaccagaaaactaggaagaaatagaccagatacttcctgctcaggcttttatgtgcatatagaagctcagtgatctttttattctgttttactcaggctattctgtattcaggtaggatatctatcacccttactcttctctaaccccatcttaaaaaacaaagcggcggggagtttttcttttgatatcagcaacagataaccaaataagatggcgtataatcctttttttttttttttttttttttttttttttttttgagatggagtctcgctctgtcaccgaggctggagtgtggtggcactatctcagctcactgcaagctccgcctcctgggtccacaccattctcccgccttagcctcccaagtagctgggacgacaggctcccgccaccacaccaggctaattttgtttctgtatttttagtagagatgggggtttcaccgtgttagccaggatggtcttgatctcctgaccctgtgatctgcctgcctcagcctcccaaagtactgggattacaggcgtgagccactgcgcccggccagaaggtggagtgctattcttaactgtccttttgtagttctttgttctaagaatttggaaagacaagttagtcctgacttccatggaaatgttttttttccaaccaacatgggtgtaattctgaaggagaattctttcttaccagtgactcagtccctctgcagggcacagaatcaacagtattcctagtgtttgcaagatcagtgattatatagggtcagtataggcaaactctccatttccaatccgttgttaatgaaatgttatttttgggtgaagttctgagatagactgaatctgagcagaataaaaaaaagtggaatcagcctgagttctagcttctacccctatttctgtgatatgcttccttattgacatgtgggctttgaaacttggtaacatccaaattgtattatcactctcttgaaaatgtcattgttccatgaaattgtgagacttaaccatttttattgatatctcagagaaaccaaatcttgagaactaagagcattggaggataagctcctttcctagagatacttactctacttttggtcatggaccaaatttggagttattcctgtggatttttttctcttgttccttaaggcagtgatagatgcttgtttagtcaccataagttgtgagaatatgtggtctcaataaagacccagcaataccttgtttttctactcattatccagccccaaartttaagatctaaatgtttcctggtgagaatacaaagaaaagtgagctcttatagcctgttgatgggaatgtaaattagtgcagccattatggaaaatagtagagaggcttctcaaaaggctaaaaatagaactaccatatgatccaacaattgcactattgggtatttatccaaaggaaacaaattcaggatattgaagagatgtctcctatttattacagcactattatttatttatttattgcagcactgtatatttatttattgcagcactatttatttattgttaacactatttatggcagcactattcacaatagccaagatatagaatccacctaggtgtgcaagcatgaatgaataaagaaaatgtatgtatacagaatggcttactattcagccaccaaaaggaatgaaattctgtcattcacagcaatatggatgagtctggagggtatcatgttaagtgaaataagtagggcatagaaggataaatactgcatgtccttacttatatgtgagagctaacaaaagttgagctcatagtagtagagagtagaattgtggttattagaggctgtgagggggagggggaagaaaggagagggaacggttggttaaggaaaggagaggagaggttaagaggttggtgcagggttatagctgggcaagaagaatactttctagtgttatgtggcactgtagggttaaatacagctggagatgatttatttatattttcaaagatctgggggagaaggttttcaatattcgcaacacagagaaatgatgaatgtttgaggtgatagatacggtgattaccctgatttgatcattatgcattacatacatgtattgaaatatcactctgtatactataagtatgaataattatcatgtgtcaactaaaaataagagggaaaagtttcaaaacaatatctatttgttgattccatctgtatggcttagtgataatgtaatcttttgctgtcttgcattgttcccatactggatttcatgactaatatctttgcctttgactgatttgaataaaaatatgttaaatgaacagagaatcttgacctcctttcagaggctgaaggattccttaatttctttcctccatttgcttaggaatcagtgccattgactgtttgcttttagttaatacggttttgtttgcttaatacagaatatgtgcaatttaagtgtcatatgtacataataagatgtaatcttttaattatatgatatagcataattatttccattttatatatgacaaagttaatgtttaagaaagttaaataactctaattaggagtcaggattgagaatccagacacagatggctctgacatcagaatcactgctttaaaccactcttcttttctgcttgctttaatattcctttacttcctccataaagtgccacatcagaatatagaacaggttattaatggaagaaatatttcaatattttgagttttttgggtgaatgaaaattatagaattaaaagctgaacatcattttatttggcagtttcatcattatgatttaaaataaatgcagtttttgaagtttcctaatttattctcttgaaatatatttggattgccacatgctgtatattctaacacttggccctggtagggtttatttgtatatgtgtgggtgtactttaaatataaagatctcactgattttaacacacattggaaatatgcataggcaaaccccaaacaactttttattcaatagtgtccatgtatctctaaacttttgatagaaatttgttccaataatggggttactacataagttgaagaaagtcaaactgaagcaaaatttgaaggcttctatattaatgatcagttttaggcgatacttgccaaaayctagttcaggattagaataggctgtgttgacattttaagtgagacatatcagttactctttttcagaaagttaaaataaattctcataatgaaaaaataaatgataattttagattcttttagagaatttactacctttacaaattaggaaaataatattcacagtatccatgattccaaccagttaacatgttggtatatttctttcagttatacacatacacataattaacatataattatatgaatttatatataattttgcattctaactttctatttgacataataacagtcttattttgcacttttatgattttccaatgagatatatctattagccatttctattttttgagttgcctgtttttttgtgtatgcatagatatatgtacgcctgtatatatacacgtatgcatacatatatatgttttttgttttataaaaagagataccatatttctattaataccgtcacagctctgatccttctttctattgtagagcttctatgcatgtattaaaatttaatttagaaccaatcaaggaagaggtcaatctgaataagataatatttgtaaagttcttgcctgtattatgtatagcaactagagctactttatccacagcgatttgaagccatgttgaacctatacaggttaattgatgcaattctcttggaaacatcgtcatctgttggcctataatgttttaaaaaccttggaacagtctcattgttttaagtatatctcctagttttttcctttaatttgtttgatgatatttttattttcttaagatcatcttcagctgaatcctgacaaccctactacatgatcataacaaaaaaagcaatgaggagtctctataccctttattttcataggaaaatattctaatatccacaaatgtgattaaaggatagagcaggtggtggggcgaggtaacatctgatgtgagaacgaagaagcaaacagttgttatttttactctggtcaggtgaaaacaagcagtcattacatgtctaaatcttgggtatctttggaatcattttcagccaccgtagtaagttgtacgtgcttgagtgtttttaaagcatgtcttatagtgaccaaatgtttctaccgcatttatctcagtaaagttgacaggattctattaggacgatcttcacctaatgagataaatattctaattgtaatcatcctcttggaatgcatatctcttctgggaattaaaagtgctttaagtggtgttgctaaacaaacatttctaaagagtaatcataaagttaaatgcctcacaatagcacaataggctttttagttgacctggtttttaatacttttttcattgcaaaatttcttattctggaaagtttggaaaaatgaggaaaaaaatagaaagaaaaatgtcgaatttaaacattttgtcactacctagttaaaatcggggataacattgtgatttagatttctccagtctcctttctttttttttttttttttttttgagatggagtctcgctccatctcccaggctggagtgcagtggtgcgatctcggttcactgcaagctccaccttccaggttcacgccattcacctgcctcagcctcccaagtagctgggactacaggcacctgacaccacgcccgccaatttttttgtattttttttttttagtagagacggggtttcaccgtgttagccaggatggtctcgatctcctgacctcgtgatccacctgcctcggcctcccaaagtgctggggttacaagtgtgagccaccgttcccggcctctccagtgtcctatctcaattcytattcaattgtttgttaactagattggaatcatactgtgcatattgttttataatttgctgttttggctgacatttggaaaaattattttagaaaaaacagccagttttgtagatgaaatggtgttttgtttctattgatttttgatttttaagttgctattacttcatgaagttagcgtctttcttgtgtattggctattctcttttcttttgctataaattgtctgctacatcttttagttcataataattattgagtcattttctgtttaaatataaagtatttttctcatttgtcgctgtaacataatccatttttaagaagcagagcattttcttgacagagttttgaaatattgtgtgactttatggctagaacacagaaacattagttagaatttcagaatcatttgatcagctctggctttgagcctctgattctacttgtagtctccaaaccaatctttggtatccttctgtagagatgtaagttgttatcaccaactcaacatgaaattgtaagaatttataacagtgttttctaaaatgatttctttgatttattcaaagaaatattatctctgataatatatttcagtatttttcatattgctcaatatcagacgaaagttcttataaaagtcctgattgtttcagcagtgatttgcatgccattagcaggtcattcatccccttccactttgaggctcaagttctacactagatttgatttgttggagggagtctacaaactctgctttcactagaaagacatgatctgtgtgctttgctgccatagtgggcctatccacatggctcattctctgtaacactaacttccaggaaagctcttgtatcaaaattcatcaccggtattaaacagtgtcaattatttttatcacctgttgaaagcttaaatgccaacagaaatttgtgcttcacagggcattgggtcctccatttatatttttcaaatgtgtagtatactcttgcttttagtcgtctattacccagtgttcttttcggaaaatatttttaaagttaattatatactcacagataatagtgcaagcaagtttcctccatgttctgctttcctttttctgactttacttcatgctacattccttcacaaatagtaataagaatttatttctactcagaatgaatgttcctcacagtggagagaatttgccactacaaaatgccttctactctgtgtttaaattcctcgtacatacaagcaggttttgggtgttacatttgttcatagaggtatgaaattgagagtcatagattgaaatgttttttatagtagagactcccaaaaaaaggcacagaaaaatggttgatatctagtaggagttatttacatgctgctatttctgatgcttcctatttgtttcttctgaaaaagtcgcccttcctatgtctcaaaacagtacacctgtaaaaccacatcctactgggcataattctacaactgcttctattctcaatgcttgtgttgcatgcttttggaccctaagagaaatcagcaagctataaacccaggaccaagaagagcatatatctcttggaaaaatagcatttgagtgattgaataaaacaggctgttttggggatcattccaaatgcagggaacaatatggatctgtgatacttgagttgttggactttgtagaatatcaaagatgttctgcttttcatattcagatttttaaatagaaggaaataaacaatttttaaaatgtttggaattaaatgggggaggtcatctgtaactgtctttgttgatttttgtgggcatcatagcacagaagagttctcctggcttagcattctggtattgctcacatatcacctatatgctaatttgagagcgttcatgagtgccatgaaggatgagtcagaatgatagacagtatgctgactttttctcctcttattgaatttagtctgatctgctagtgagagaaataaaagggaaataaagcagggagtataatagggaaacctattttctccaaatgttgagatatttaaaaagtctttgttcagtgtacctgcagttataatctttccagagattcatgagatgtcagggctaggcaagactttagaattctatgtagtaaactcttgtttggggctgggaaaatggagggtcacagttagaataattgcctaaagccacaccgacagagagctggtagtggaatccctgttttctattcaccttcctactcagttgcactacaagtttatcctaattcaagtaagcttagacatcaccttgggtaactttctgatttaccaaatccactagtggaccatattgaatttgcttccaacatgaatactcttcatttctctccatccacactgctacccaccaaaatcccatgccttgaatgtaaataatcttagagctgatctgtttgcttctgtaacttcctgctactcattccataagcaacagaagaggcaaaatgaccttttaaaaagtataatttgatcattattctcctttacttaaaatcctagaatgacttccattgcacttaaaattccaaatttctttccatggcctaaagggtctacttgatcagtgtatcgcctttctctagaacttaatctacctctgacccttgtgtgctatgctgcagccactttggcctcctttcttttccccaaaattgaagacacatttccatctcagggcctaagtgtttgcagttagctctgtttggtgttctcttctcctagctgtttacagctttcagccttctgcagagatgttccccagctaccctgccgaatatcgcctttccccacccaatcctttcattaccctattttttcatagcagtaactactaattaattatgtctttatctattgtcttttcccagtctccaactagattgcaaagtccctgagggcagaggtcttgatgtcttttccattaacaatatctcgagtaaccaccagcaatctgcacatagtaataacctgaatattcctttaatgaatgaataaactgaaaaccctaaagttcagtaatactggcctctgtgtagagtttcagaaatatgccaaatatgctttcaagcatcccagcctgtctagtgtatcctttgctctcttggccttctgagatcacttttaattggcatcctctgaagttgttactctcagtcatgctggttgataccccgaatggataggaaatggataggcattttttctgtccatctctaaacatctctgattgggcctaatatacctctcaggcctgctcctctggccaggacccctctttttatgggaagtagggagacccaggaacacagaacctataatatattagaacctgttatatatctctctagaaaaaacagttattttaaggaacgtgattgctggggatggcaagtcagaagcctgtagggggaggcctgcaggctggaaactcaggtagcagttgatgctgctgttttgaagctgacttttttcttctatggaaagcctcagttattgctcttaaggcctgccaagcaatcggatgaggcacacccacattgaagattatctcctttacttgtggtcaactgattatagatgctaaccacatctaaaaaatgccttcatagcaacaccttgattagtgtatgattaaataatgggacatgatagcctagccaagttgatagaaaactacccatcccatcatgcatttgtggtattggagaaaggaaatgcttctccattgttactactgggactgttactgctgagacacaccgaagaggagaatttttagtttttagtttgctttttagcagaattcaaacttaaatataaaattaaccaaattgtcagaaaggactgaaggttatcctttcaattctgagttttttatgtaaaattattttattattagcaacaggttttgaaaacatttatcaattatattcttatatattggtgactttaggtaatgaataaatctggatttatctttctttataataaaaatatggtctgatcaaagtatataaaattgaaataaatattgtcttatttgtgctttaaattaattgtagtataatattaataggatattatataatattcagtcattttagaataggagaaacattttagggtaggataaacaagaccgtatcatgaaattggagattttaattgttttgtaatattaaattttacctctcatgaaaatagagtagataattattatggattatgaaacagcataattagttgtaacagttttaccttgaagaaaatatatcttttttataagcagaaaacttcattttgttttctttaaaatgaagtgaataccggccgggcgcggtggctcacgtctgtaatcccagcactttgggaggccgaggtgggcagatcatgaggtcaggagatggagaccatcctggcttacacggtgaaacgccgtgtctactaaaaatacaaaaagttagccaggtgtggtggcgggtgcctgtagtcccagccactcgggagtctgaggcaggagaatggcatgaaccctggaggcggagcttgcagtgagccgagattgcgccagggcactccagcctgggcaaccgagcgggactccgtctcaaaaaaaaaaaaaaaaaaagatgaagcgaataccatctctactctcaatgtatcgtggacgataataactatgctagtatttctgcatagtattcttaaagaattctgactgaaaatatttaaatgaaatacacataatcactttgccacctaatgcccatcaatcattgccaacattgacttttaataaagacacataaccagagatgatttttaaaaattatggataaattacattagaaaatttagctggagcaaattatatttgattattattaacctgccataatttatattcattaaattgccaaatcttgattataatagtcaaaaagaaaaggtacatgataatgatctagaggtagaacacatgctatcaactggaaaactaattgttcagcatcctaagtgtatttgttgcttaattatatatataatttctacaacaagtggaatgatttacatgaatgtcaaataactggtttataaatgaaacctgatattaagctaaataaaatattggcatatagtgttcacttatgagctaatattcttacctctagcttcatttacaaattarttatgctacaaatatattaatgttccacaactctttcacacttccatcaatatcgagtttattccattacaatgtgaaattaaaaaaaactgtagaataattacttctgcttcagaaaatatagattacctatcttccagtaagatgctgcaatttatttagataactgcatttattgcattgattttgaaaaattgctcaacctaataccctttcttctttgctaattcctggggaaaaggaatccttttcattttgatccaaatgaccattaatcatattataaagtgtaataattaaccctttttttaagtgtcagagacacatgaatagtgattttatttggtttcaataatcaagtaaattaagtgataaaatggaggccataattaagtgatcttgttttctaataagaccaacccattaatgtgcatgtaaagatgcctgtcatcaatttaacagctttctgagtttaatatacattaagagttttatttttggaacaacttagtaatttttagaaacttgagtacaagtgttggcaaaggttctataaaattctgtctacagaatatgtggaacacaaccttgggtcgtatctccaaggaaaactaccatgattaaaaagacaatgctttgtcaaattcacttgttatcacaatctaattgtgtwaaatgccggccacattytgagtagacactttaacttggcttyccttgggaaataggaaatgaagggcccgaaagaactagaagctgcctctcaattttytttcaacatggcaaaagcatttgcatttatctgtgcccctctcttggctacactctcagctttgatacactacttgagcatgtggaggtttacctactgaatgtgacccttatatgaataatatgagacttttgtatcaacagtagtgatggtttttgtttttaagtcacattttattgtatgtcttctctacctctcactatatgacaagtttagtgaaggcagggtctgtggctatcttgtttattattgttttatatcctgggggtatcacagtgcttgatcatagaaagggctcactaaatatttatggaaggaaagagaggaaagaagggagagtgaaagaaaaaacattcaatgttctcactcttaaaccaagaaaataattgtttactttatttcattgtagtaagaaaactgaacatgctactaccttcaataaatttttaagtctgcaatacagtattgttgaccataggaacaatattgtatagtggatttctagcatttgtctttcttaactgtaattttgtgcccgttgtttagtaactctaaattttcctcttcactcagaccctggcttccccccattccacaatttgattctgtgaatttgaatattttcatagaaaacattttatgagtagaattatgcagtatttgtttttctgtgactaacttatttcacttagcacaatgacctccaggttcatccatgttgttgtatatttcagaatttccttcttttttaaggctcaagagtattcgcgtgtgtgtgtgtgtgtgtgtgtgtgtgtatcacattttctttattcatctgttgatgaacatttagtttttttcacagtcttggctattgtgaatactgctgcaatggacatggatttttaagcgataaagaataaagctcttttcatcttttaactggaattattttttagaaaatattttgttccaattttatgatttttttgctattctttcatgattaaaagttatgtttcattattatcaggttgtatatttacatatatattttgtctgatgttaataatggcatgtttactttctttgtgtaagctgatgtatggaaaatattttcctagcttttatttcacattatttcatcttttgtttcaatcattcatcttgtatattttggcttccttcttcccttttactcaacttagaattttagagtgagtaacttttaagataaaacgagtttaacagataatttagcccattcacatttgttgtaattcatgatatttgtgtgtgtttgttatctcttcatttttgaattattttgctttttaatacatcttttctccatttcttctgcattaccttccttctttattattaattgaggttttttgtgctgttcttcttccatcttttttaaactaatgaattacaaaatttgcttctttttatgatttgtctcatagttattgttaaagttttgagacctgtgagtaaaaatattttatattaatacctagacttataaatcagtactaatatcttgtcttgaacaggacttcatccctagaatactttttatttctacatcatctgcttttaaataatcagatattaaatccagattgccatcgtttcatttttaaactttgcagcagagatttttttagatgtgaacataaggtgtctattttctttgcttcttgttattttgtgttgtctttctctttcttgggtaattttttgttttgttttgttgaatcagtaagcttttcagaaaatgcctgtaggtgttaaatttctgagcagttatatatctgaaaatatctttgctcttacatttggttaatactttggctagatttagaatttaaaattatgaaatgtttttctacagacttgtgaagacattcaatatttgtttcagcacatggccttagaaatgggatatctataccaatctaattcccatgtttctgtaagtaatatacctgtttttatcttctctgagatattttggaatttgctcattattcttggagttttgaaatgtcatcaaaatatgtctaagtgctggtcttgtttagtaatcttgtatacctcaggggaaatttcagtctaaagatgtatatcttttccttcagttttttttttctctctctctctccatatatatatatacacacacacacatatatatacacgtatatatacgtgtaaatatatgtgtgtgtgtgtaaatatatatactttttatgtcttataaaacaaacgttgggatttctgtttctgttctctgtctaaacttttttatgctctccaggccatcatgtgcttgtcctataatctggaccaaacccanggtacacatttgtagctcacaaattcttcactagtcaccatctctgacttatcctaaatgaaatttttttttatttttaaagtgattatattttaaatgtttctttttataaaatgccaaccagtttttcttaatggctgtaatgtattgaatcccttaagctagttcattattcctatttcaagatttttttctactccttctattaattgttttttttttttttttttttgagaactagttttgtgttgtttgcattggagtagcatatacaagccattgtttctgacccgagtgctctcttttagaattttttttttttttagggtcagatcccctcatctagtacctctgcctttaaccgcagtctcatgaatccaactgctattcagcaccttcgactcagatgtctgataggcctgtcaatcttgggagacccctagctgaacttccacagaaggatgggtctgctccttccctagtctccccatatcaggagatgatggtacccttcaccctgtagctcatgccaaccttggattcatcctgatacctttcttgtcctacattctacatccaatgtatgaacttgtgctcacttttatgtccaccttcaaacaaataccatatctgactgtctctcaccactccccagctacatccctaatccaagtcaccatcatctttcacttactctattgcagcagcaatagaccaatctgggctctgcttccattcttttcaccctatgtttattatgtattcagcggcctcagagaaatgtaaaacataaatcaagttccatcactccctgcaaacaacaacaataacaccccttataatggctttaagtcctaagcatgaccaatacagccatatgacatcaaggtcctgcttacttctctgactttctgttctataatttctataatgtctatcattgttcactgtgtttcagtcatattggtcttcttgctattttggggagtatgttcccacctcagggcctttgcacagctgtttcctcacctagtagctctttctctagatattacttggcttcctccctccctttaattgtttctcacacaaaatgcacctcctcagaaaaggattgctctcatccagttatcatccactgtccctctttatcccttttccctgccctttttcttaataacatgtaacgctgcctggtgtgaccaagataggtttgtttgtgtttgttgttgttcttcaaaatagaaacatgaccagggtatgggactgatgacttctccaccagcatatcctctgagggtgctgaatcatttctgttacatagtgggtgcagaggaaatatttgttacatgaggctatatatcaaagggcttcatgaaggttttgctttactgtgaatctggagtcagataattcttttctttatttctcctctgttttctttgtagagatcatgaatatcttaagctttatggtgcctctctctctatagtttggctatgagcctccccgaggcagatggttaactttatttagaaagagggtttcaggactttattctagtgataaataccgtggctgctagtcatagaataaacaagggcatgagagaaggcagccaactagaccagctgttcacaccatggtcctttcataattatcctggttactgcctcttggctgtgtgtattgcttgactccaagtgtggggtgtcttttgtagagctttatctggagctgttttagggagaatcaatctcacttctagtagatttctcctgtgtaagtgtgggctttgatttcctctacttctatttctactaagcccattacttatattaatcccatctactttcaaccttcaaggacttttatttttcaaatttctgatctgatagttaaaattttccccgatgtgccatgcacttattctaaaatatgatttttttcctggtgtcaataagatttggcgtacagggaaagacagatatatatgacttaaattttgtcttctttgcctctattgtatgttactgtttttatcttctgtgttgttgttgttgcttaacaaatgtagctacacatttatatcttatcactgttttcttaaaaataatttgttttgttcttctcccttttatatttagaaaatatataaaaaatgtggaccatgcctttgatcagaaattattatgaaaattgttgtttagaatgggtttgagggtggaaaagtttattaagagattgtaatttaacgaaagagaggtatgaatattctgagaattgaggtgtcttatgcattaattggattgctagatggccccactgatttcctgtttttcttgttgtgttaatctatatattgaattaagcacctcaaactatgagttattagatctcatatatctatatccctacagcaatttctctaagctctggtcatttctgctactttgtaatctaaaactgcttcataacttcctagatagaaatagaatatgtgggtgctcagagtatcagatagaccccatatataatagctatgaaatttcaggctctataatggattataggatatttttgaaccttggtaggttgtaggattagttgcttaaatacatagtaccatagattgcaaatgtttaaaaatcttgatgctggaatttattagaaaaacaggaatgaatacagtttgagaggctagaaccgtggatttcaaatgctagcctgtatgagggtcccttggagggcttcttaaaatacaagttgctggttgtcattttcagggtttctgatttacgaagtataggatgggcctgagaatttgcatttccattaaattcccaggtgatgtggctgctgctcctgggacaacatttagagaaccgctagattagacagtctcacaacagggatttctagggacagcttaatggttactttatgatttgaagctggaatacccaattaggggtttttccagtctcatttcatttcatttcatttgcttccttttttctttcttccttcctccttcccttcctcctccccttcctcctccttccttttttatctcctctccttgcccatcccctttcctcccttcccatcccctcccatctcttccccttccctcccctcccctcgctgctcctctcttctcctctttctttctttgccatttcaggtgctttatctcttaagcactgcactgctttgggttatccatttaagcttagaaggagagcaacagaaaaggaattgaaatgtaaagcagatatcaagagagcaaaatttgtcattaaattggaactagcaattaatttgtctatttattcatagtctaagtgtgattatcaaaaatgcttgagaatcaatagaaccacatgggtttttcaagttggataggaccactgaagctacctggtggaaacacatcattgtattgatgagaagactgaagcaagaatatgaaaagcatctgaaccaatgttttcttttccacgttctcatcactctctgctacccacagctgcccgtcatggatatactatatgttgtcagctatattttgattacttctctgtatatttatcatcatagtttactaaaattgttagtattataccttttgcatataagaaaggatgaacatttctagttcttaaaatgtaagaataagtgattacatattaccttgaaacagtatggaacactttttactttaaaatatttttttcaatttttgtgggtacatagtaggtgtatgtatgtatggggtacatgtgatactttggtgcaggcatgcactacataataatcattttccagaaaattgggtatcagttgcctcaagcatttatcctttcaattaatgctcttagtctgttggtattaaaacaatttttattttctgatgagaaagttgctgtcactttgatcattgactttgctacaggaattttcttttcttttcttttcttttctttttttttttttttttgttttttgagacaggtctccctctgtcttccaggctggagagcagtggcacaatcatggcttactgcaatctcaacctcctgggatcaagtgactcccctgcctcaaccccctgaccctcactatctgggactacaggtgcacaccaccacgcctggctaaattttgtattttttgtcaagacaaggtttgtcatgttgtccaggctggtctcgaactcctcggctcaagtgatccacctgccttggcctcccagagtgcggggattataggtgtgagccatcatgcctggccaggaattttcttgaatgcttcaataactttattccatttaactctcacaacaatcccatcaaatcaagtatcatgattatgcctcatcattcatttcacaaattaataagcaaagtcttagggggttatcacttcccaaattattacatgccagtgaaaaaccaaagtttgagcttgcacacaaactttgaaacactattcaaaagcagtgttttcagcacctgatctttattgcctcacagagttttatacagatacaaaattatgaaatgtagctggagccaggaactatgacatggaatatacctggcatacacatggtctttgtcttttcctacatctgtgaacttgttgaagctttagatgtcttcccagctcagtgatcatgaagacgtcctcactgatgagtcatctttacttgtcatctctagctacctggaataaaacacccagtgtagtgtctgggatccagtgggcatcgtgggtcagttagttctccagccccggttccttttctggttgcctgagcttggaaaattcataaaatctctttggacctcagttacgcaactgtgaaattgtgctatagggtgacttgaaaccactttgtagattttttgggagagctaaattaggtaatgcatgtaaaagcatttagtgcaaggtctggcacataggatatatttgctaaatattcgtagaatcagatgaataactctcatgaaatattttgttaaacattgtgattgttcactgggaatattatatggctgtgtgtgccactgtccgtgtttcccctaataattaataaatattaaataatttaaaattaaatattaaataatttaaaattaaatattaaataattaataataaatattaataaatacctttggcaagtatatactatgtcttcaaaatgtttcttttccatttaatgttttcatttatctgcaacatttcttaaggcttatttgcatgtgggtaaaattcaggctacaataatagtcaaggaagtatatttctcttgttctgctcccatacaaatggtgcccccctgcaagcctcttctgaattattcctggacacccaaataaaaatggtaatttttctttccttttctcctggattcttattctaacatctgctaggaggatccacaccctgtcctaggctagtagtgtacagaccatggttttgatgtctgtgcaaaaggtacaggtttgtttgcatctcttcaatttttttcattgtatgaaaatataaataatataaaatgtactatttttaagtatacgattcactggtattaaatgcatctataatgttgtggaactatcaccagaatccattgccatagctcctttaatcttacaaaactgaaaagttgaactctttacccattaagcaataactccccattccccctcacttaagccccgggcaccactattctactgtctgtttttatgattttggctattcaaagtacttcatataagcggtatcatgcagtggtatctcatctttttgagactggcttatttcacttagcataatatcctcaaggttcatccatgttatagcatatttcagggtatttttcctttttaagactgaataatcatccatttatagatataccacattttgcttatccattcatccagccacgggtacttgggttgcttccactttttatctatcatgaataatgctataaacatgaatgtacagatatctctttgagtccctgctttcggttcttatgggtatataccccgaagtagattgctgcatcatataataattctgtgtttaaatttttgaggaatcaccatactgttttccacagcatctgtaccattttgcattcccaccaacaatatacaaatgttccaattcttcgcattctcgccaaaatttgttacatgttgttgcaaaagtaattgtggtttttgccattaaaagtagttacttttgcaccagcctagtatttttttttctgagtttttttttcttttgttagtaatgggtgtgagtggtatctcataatttttatttgtatttctatagttgttattgatgttaagcatcttttcatgtgcttaccagtcatttctgtatctcctttggagaagtatctgtgtattcagcgtttgcttattttcacattgaattatcagtattttttgttgttgaattttaggagttctctatatattctggatattaatttattgtcaggtacagatttggctttgatggcactaaagctacttcttcttaccttcgaagtcacagtacctgtaatgattgcttatgtttagcaaattaacatcattaggctttctctgtcattatataaccccttcatcctaagactcacacatgagcacctcaactgaggctggggatgtgtgtccctgttgttgggggaacacatgtccttagctctgactccctttctccagggtcatttctatcctctcttccgatgacggtctaccccacagatcctaagccacatccaagtcacctgaattccagcatgattcttacttagattcttaagtttaaatgcttgtaattccttcttcctttcctctccttattaagtacctttaaggaagtagaaaactctcaacatttagaaacacttacaagcatatgaatttccatattattaatgcctcgtgaccaagatgtcctgacacatttatatggtcctgtaaaagttttataaataatctggagcatattatttctttatatcctcactttgtgaactagacaaggtagatattaaaattccaagtctcaggaagtttgaatgatttttcttaagcttagtcagctaattaggagcagaatcaggactggaatttagggcttctggctccactttatctctgaggcttgtactattctactgggatatcattagaagaaatgccaaatgaatgccattgcctcttcagccctaaacacaaagcccagttaagtgtttccctgacatttttcctgacatctataaaaattcatattttatttttattcacatgctgattgatttagatgttatgaaaattaaataagttccaaaaggcagaagataggctatacacatatttttaaaaatttgtcattgttcaaacaatattgaatataaaattgaaatgtccctcattataaaaaaaaattctctaagagtgactagttataaggttatatcttttggcatgatgcacctctaagcagtgcttgcataaagtctctaccaaagctgacagagcttccctaagggcctaaagaacttggcaaatgttgttgaacaaaaatgacaacaatgaaactgtgtaggaggattctgcattagtgcacctaagaatgttctcgctaatttgagcacttctcaccatggaataatgcttttgttcctctctgtctttttctgctgtctcacagagactcctaacagggctccctggaccaggcttagacatcaatagggatggactagaggcattccatggaggtgacaattacagaagatcagaagtgcctagctacacactctattttcttctagcatctgaaattattgacttgaacccatttgtggggtcactaagccaccttcatataatatttattacatgtgcaaagtcagaacatatggagagcatttgcatttgaatgggggaaacatgctgttagataaattagaaaatctttatatttgcatttttctttatttaaaaaaatcaatctgtggtatagtagagctaggaatattccctttttggttgacttcttcactctgtgtttaaactttctcagcattgaggcatgtgattaaaaggagctattttcctaatacaaacaaaagcattgaacatcctgtgaaacaaaagttgttcattttaacttgcgttatatggaaatgtgacatgttttagatttgtgtaagctcatgtacttgaaaatcagacttgtctaaaatttcttttgtaagatattagagaacttttgaattatacctcttatttttgaatgtacattcctcagagaatcatctttatgcacaaataatgtttattttatatttttaatctactttagcagacccacstgattcttctacatgtaaggttgaaacagttttgagtgataaagaactgattttatggagcaactaatgattttgctgttgctacttttgtgccagcaaatacgtaatccacaagaatgttataagaaagatatttatcaagcctctaaaaaaraagaaagtaatcaaaagataaggatgcataaatatcttaagactactcatgacatcaaggaaggtgaatcagtattaataattcactagtttgtgcatacttattgtcaggtgctgggtcaaattaaattggaatgatttgttgacatgaggatttctgggttcatgatggattcacattaaaacaatttttatgttttaagccttctcccatcaaataggttttacggtcttgtgtacacattacatgagggaaatagtactttaacattttacatgctggtgtatagtctatatcagcagtccccaacctttttggcwccaggaaccagtatcatggaaggtaattttgccatggagtggggttggggaaaggagatggtttagggatgaaaccgttccacctcagatatcaggcattacattctcataagaagcatgcaacctagatccctcaaatgtgcagttcacaatagggttcgtgctcctatgagaatctaatgctgccactgatttaacaggctgcggagctcaggaggtaatactcgctcacctgctgctcacctcctgctgtgtggcccggtccctaacaagaccattcaccggtaccagtcagtaagctgggagttggggacccgtgttccacatgttataaaaacttaggctgggcgcggtggctcacgcctgtaatcccagcactttgggaggtcgaggggggcagatcacgaggtcaggatatcgagaccatcctggctaacacggtgaaaccctgtctctactaaaaatacaaaaaaatagccgggcgtggtgggcgcctgtagtcccagctactcgggaggctgaggcgagagaatcacttgaactcgggaggcggaggttgcagtgagccgagatcgcgccactgcactccagcccgggcgacagagtgagacttcttctcaaaaacaaaacaaaacaaaaacttaaagagttatttgagccggacacagttgcatagacctgtagtccccagctacttggtgggctgaggcaggaggattgtttgagtccaggagttcgaggttgcagcgagctatgattgtgctacttacactccagcctgggtgacagagcaagtccctgcctctaaaaataaaataaattcggaaagaattatttggtgattcaagtataaaacaaaatctatcagatatttgtgaaaaacatattgttacattgttacatgttttaagaagggaattaaactcctagactctgtatggtataggagttcaacactataggttggtctatacatctaatgttggatatgtattttgtgccttttatttaaaataacatacattttatggcatttcttgctttgcattaattactggccatacccagaatcctttccttcgaataaaataacctcttttcccaaacttttacatattgttcatattttcaaccccctacacagttgttaggtcttgaatttggaagaattaaagggaataacattaatgacagtgaactatgaattaggaacctcacccctatcaatagccaatttccctccttttcagttttgtgtctcagtaatagtccttaaaacaacaaatgatacattaagtgacctgagccaatttcctcttgacatggaactattcaacaaagcctcacataagctaacatttcctaattagccccttaactgttgacttgagaaagggtttgcaatacaggattcttatatattaataaaaactataggtaaaaaattcaagatgttgttgaatctttacagttcgactcattattcaaattcttcatctttacatcaagtttctcatctttacattcctctaattcaggtcatctccacaatatgtccaataaaccgtatttgcaagatatcgggagaaaagcgagtctgcctctaggaattataactgatacttcctttgtgtgatgaacagtgattttttatgtatttagtcatatgctattagggaatagatatctctagatcagagaacagattgtgtattagtcacagaacatcttagcactagttcctccagccctagttcctgtggagtaacgcgatgagggccagatatctatccccatgggcagcagtgttgcaccgcatgagaggaaccctggaattatgaaacttggagcttacacagggcagctgggcacatctgcccttcctcccctccagagatagaaagacttgtatgtattctggcatgtaagcaaatgactctcggggagagtaaaaagatgcctccaggttttatttcatgagcatatggctccagaggagacgcatctctaaacctctcaggaacagttcattgtcttttacttctgagacatactgtccattcagtcattctttagccaaggttgccagtactctttgctaagaaaccccagatcatgcagaaatgtgaacatgttcacagagaattgtctctcaatcaatagtacctagtacattattatacaaagttctggggatgtttggcagggattgaacccatgaactagaattatgagcattggaacttatctaaaccaattagcaaataaaaaagttacacatttcttgagaaaataattttatagattaataattacatgtaggatatgcatatctcaagtcatctgagggtttaatgttttgtatactttatcttacaaaatagattccaattcatgctgtctggatatacaagcattaaggccttccaaaggcaaaatcaggctaggtgtgaaacatgagtggtatacggaggtatagcaagtagtgtcccttgatacccttggggaattggttccaggatgtcccagagataccaaaatccatggatgctctagtctctgatataaaatggcatagtatttgcatgtaatctagcccactttcctgtatactttatatcatctctatattagatataatgcataatacaatgtaactgctatgtaaatagttgttttatttgcattgtttagggaatatgacaagaaaaaagtttgtacatgttcaatacagatgcaatgttttggaatgttttggggcatatttttgaatccacagatgcaaaacccatacatataaagggctgactgtatttaagttcctcattctggtgtgattaattttatctctttttagtatacttgtggttctcaagtcactaatgttttagttataaggtgaaaggcacactgtgtaattgaatgctaaggccaattctttacctctgatgtctggaataagagccagatttcccatccttttatggaactacaagcgtcatggctattagcaatcccagaatagttctactcccactttggctgagtttaagatctttttctaaagacagtaaaaagagcatcagaaaagcatttgtgaggctgaagtacctcacataccaattttgtgggcacatttttggacccttaagttctttttgacagttttataaactcatgcccagagtagtttcctttatttaatatttgtcttaccctctacttacaggaaatgcaaggctcatcagctttttcagggagtagcatgactcagagtctgatgtacttgaaaaaaacacagcgggaatccaaacacacttatgtcatttttatgtgttagagagaaaccaggaagcatgaattctcacttttcttaacgtctttacagtgtcaaagggatatttgtgaaaagaggttgtgggaatcattgttctgaagtgcatccaagattagaagcctggtttatgtgtgctattttgcctcccagtatgagcagcctttttatatttattccaagtattactgtaaactactttttctttatacatacacaatatatctttgtctgtgatcagagcggagcttcatttccactgaccaatagaagggcatttttatttgatttaagtgaaacttggggcataatgcattctttcaaacctctgattggacatgacaaacaaaaagcttgagctagaccatggtcatctgaactatttccaataacttacctttgtaattggagtattgcctcaaatatttccctgaactctaattaccatggatacgatatcactcaacagaactttttcttaggagcactaagagtgtggaagacagaggataaatgttgtagtttcatttgattatctctatgtggatgctcacatttttttttctataaccaaccagtttcattttgatgagagtgtttggagagatggttatgctgacactagcctaggtaagagagtaagtctccctctcttaaaaaaaagtgacaatgtcacttctgctcacagtctgttgatcaaaatgaggcaaacggccaaacctgatgcctataggttgaggaaattgtgtatttgtgaatagtaatagcacagcagccactaggcctcccagtcgtactggagatttctaaaaggcaaagtgtttttagtttgttttaggtaataggttgatatttagcctattaaaaaggcagaccctggcttgacagacaaaaattaataattaatttgggagccagatacagacttaggttttttgaattcttgtttctatattcttattttggaagtttacagtttggttttatatgcaggggtgttagatgaaggtgtattgttttgcaaatagaaacagtctcaggagacaaataacaatggcatgagaaatttatgaagtttatttttagcagcactttcaggcaaggttttgccatcaatattttcattggtacccaagaagccaacagaggaggccatgttttatgaattgatgtggctacaaatattagctctgacattttttaagtgaaaaatggcagaaaagatacagaagcaaataaatatagagtctctgacagccagcagagatggaaccctttctaacaattatgaccaaaggtatgtgtgtgtgtggtagtttggtttatacttgcttgaatgctgtccttgttctttttttttttttttttttttttggtagttcttgcaccaagtgactgacggcttcctccaaaacaatgtcagcaggacaaggatgtattggcagggtatcttttgaatcagtaaccccatactgatccttgacctaattaacagtctgctataggcatcttgcagtttactgctactgctatcgcaacatcaagaaaatgttgaaacttaagcacccataagaaacttaagggggtgtcccactcaagtcattataaattcagttttattatgctaaaattgtgtgaactatagttcacacaattcaggctggctggaagcctgaatactacattgttttatattataccacatttattggaagagttggtttgcttttaaaggaatccatcactattagtttcatggcgtatttaacatctggtcaggtcagttcaatacttggaaatgttttgatacttgaagtttccagcagattttaacacatgcctttggatgtaagtaaacacctttgtccacaataaataaaatgtaactgagcaaatgaaactgtcacaatgctttgaaaactgtagcatactgaccaaatctatgccatgattttaccttctactgatggaaagaaaagtaactttgattattgcaatctgggcaattcacttatgttatcttatttaactttcatgaaaatcttcatatagtagctatcattattccatttcaaaatgggaacagaagcttaaaaatggaataatttaaagacatacaacctagaagaggcaaagcttctgaatacaacagctatctaactccaaaggtcttggttcttataagaatccattctgttttatgtctgtgattgtaagcttttagcagtttctcttcttctatttctttttttttatattttttattatactttaagttttagggtacatgtgcacaacgtgcaggtttgttacatatgtatacatgtgccatgttggtgtgctgcacccattaactcgtcatttacattaggtatatctcctaatgctatccttcccccctcccccctcccccctccccccaccccacaacaggccctggtgtgtgatgttccccttcctgtgtccaagtgttctcactgttcaattcccacctgtgagtgagaacatgcagtgtttggttttttgtccttgcgatagtttgctgagaatgatggtttccagcttcatccatgtccctacaaaggacatgaactcatcattttttatggctgcataggcctagaaaggtgcagaaactgctttcaattcctgaagggacttgtcaggcaaaataaacatactgaaaatagctttgaccatttctaaatcctttcctggatcagagttggaggttgctcctacattcatacgcattgctgatggattctcatcaatggcccctacttctgggttggctgagatcaataaatcttagcagtttataaatggaagaaatggctttacatatcttgtttcctgaatccctttggatattttaaaagaggtgattaaagtaaatttatgtttctgcagatgcatgtaaagctaattgttttaataacagtataattggcgaaaggaagttatgtgtaataagaaacaaagcgtaccacttccaaaatattcacattagrcatttgttaaatttgcagtgagtttcagcatacacacatacacaacacagaccatatgtgaacattaggaagattgatttgtttaaaaaatccacttctacaccacataagtaatatttcttactgagagtcactgaagtgaggaagaaaaataaccacataaygggaaaagaaaaacattaaatttagttatattgtatatgttttgtgtttattagtttttattaattgtaggcatgcaggtaaaaaaatcgcctcatttgaaaattaataacccagggcacaaactattaattaaggcatatagcaaatgccttttaaaagtattttatactggctgggcatggtggctccgcctgtaatcccagcactttagaaggccgaggcaggcaatcatgaggtcaagagatggagaccatcctggctaacatggtgaaaccccttctctactaaaaatacaaaaactagccgggtgtggtggcgggcacctgtagtcccagctactcgggaggctgaggcaggagaatggcatgaacccgggaggcgcagcttgcagtgagcggagatcgcaccactgcactccatcctgggtgacagagggagactccatctcaaaaaaaaaaaaaagtattttatacttaagtttttctagctgctagtttaagagagatgagaatacattcaaagagcagggaaaggagagtgtctgaacagaggaatttctaaaaatgagtacagtattaacacagttatccttacaatagcctgaggtcaggactattgttttctccacattttggatgaagggactgagacacagagaagttaagtaacttgtataagatagagaagagacagacatgaaactgttataaaaaggaaagagacaggaaaagaggagaggagagagaaagaacaaagcttggatggcaagttaacttaggtcatctacctttgaaattcaagtagtctgtaacttttgccattacatttagaggcaccctctgtgacacggtcatagaatactggttcactcttaggcattcaacaaatgcctattgagtgtcagtcatttattcaacaaacatttactgaatgtctaattaagtagcagatatagtgctagttacttgagctacattgcggagacagggcctctttgaagagcttgtgcttcctctccatgaatgctagattcatgctttccacctaaaccctacttttggaaatcaagaaaagttcacctccttcatgagacttcttggattaaccccatagtctattttcacctagaaatagaaccctgtttttgagtcatgcacgttgccagctgggataaaaggctacatttcctagtcttatacctaggtgaacccatgggtctcaggtcaatgggatgtaaataggatttgtatgagaattctgggacatcctccaagagagcagattcagctggcaggaaaggaatttgctttctgatatggtttggctgtgtccccacccaaatctctacttgaactgtagctcccgtaattgcaggagggacctggcaggaggtaattgaatcatgggggtgggtctttcctgtgctgttctcgtgatagtaaataagtctcaaaagatctgatggttttgcaaaggggagttcccctacacatgctccctctttcctgtcgccatgtaagacatgcctttgctcctccttcgtcttccgccataattgtgaggcctccccagccatgtggaattgtgagtccattaatactcttttctttataaattaccaagtcttgggtatgtcttaattagcagcatgagaatggactaatacactttactacctatcctcctcctggcctggaataacatcactgggtgggtggagtttcagtcactgtcccaggacaggaggtggcctggagaatggaggccagtgcttaggtgtggagtagaagaatataaggggcttgcatccctgatgacctgaaggtcccatttcagccctcaaatagcctctttctggatttatttcatttgagagagaagcagttacatgaagtttgttactttgtttgagagataaatgcagttatattaggtttgttaattttgttttgtttttgttttagttgtatgatgctaaatccaattctaattgatatacctccttcataagataattttataaacccctggaaggaagattgttcattgggctttggcaggcagtgaccttaaaactaggaaaaactgagctttaagggcccatgaaagtccttggcttgtgggtttgctggctctttgctagaattatattttgtttttttctggttcagggtaccgtaacagaaggtgggaagctatatttttcatgaaactgattgcttttctaattaacaatcttgctaataaagcaccactgtacagcagatatagtgtttttaatgtcatggatattgtacctgaaagtaagtgaagaagtgtcagatagtttctgccaatatttgagcagtcttagttctaactgctacaattatgcaaggtatttgtcttagaagagcaatggccatttgagtaagactttccatatggtgttccacagtcactgggagaaaatgggcctttttttttccttagtgaggtgatcctctccttctttctctacaaagtaatgtggagtttggaatgaattctaatgagtgaataataggaagattttgcatactcatttggacaagataaacacaacagcatggttaaaattcttgagatgaaaggctgagtttctgtagcttgaattttagatgataaatatcaagaatctatttgaaggtcagctatcacaaatataatttttctctggcaacacttgggtagctttccttggcaaattttactcaaaaagaagataaattatttctgcctcaactttttcttttacctctcttcttctttctctttattcgattgtttgcctttgaaagtctggctttcattgcatcattagacagaattgtgtgaccattcccaaagagattgacagtgttcatggcaggctgtataggaatctttctgtgtgcaggctggtctacaatttagcataataaagatctggccttatattcataggatctagccaggaaaattagtcttacctcagggtttaaagaaatgagggtgtgtcccagagggatctgtctgtggccagcaggaaatttaattttaaaaactgaagaatatacaatagttcaggcactgaataatttgagcctgcgaaggtgcttctgccacatatattatcatagtgttagtaaggccaggaaggtctgaagtttgtatgagttcacagatattttgaaagactcatgcaggtatttttgatatgattccattttaaaatcacattgtctgtgatgtgtatttatggcattatctaccacatgtgtttgtcctgtagaatttacattacaaaaccttctctgatcaataattgacgatgagtgactgtagtagtttgggaaataacttgctttttactcttttgtcacctgcttcaatatagttcctgctgtttgatgagaattgactgagctggagcctgcaaaagtaactgtagtcaaattagttacattaaagggtcaaaattatagctgcgtggagctaaggtcatggcagaaccaaagagctctgggcacagatcttcctttcatgctcgactgggtccaataatcccccgaggctcaggtctctgattgcatttccagatggtctcctctggtgtaaacaccacccgcgctctgtccaacagcataagctaccctggcagaaagcaaaacagcaggtcagggagccctgggaattacacagtgggtggcacctgttgccaaattttgacctctctcatcccctacgttatatacccatgatattttcaacttacccctttcctttggtatttgcagggcaaactctctagtttcttagaataaagccagcttcatccactccccttcctaatctccatatattcttcaaactggtgcttagatttcctggctatcttgcagatgaattctaatatctactagtcagtagaatgcatttgtgtacttacacacttattattcaacaaatgcctattgagtgtcagtcatttattcaacaaacatttgctgaatgtctaattaagtagcagatacagtgctagttacttgagctacaatgcggagacagggcctctttgaagagcttgtgtttcctctccatgaatgctagtctcatgctttccacgtaaaccctgcttttgggaatcaagaaaagttcacctccttcatgagacttcttggattaacctctctcagatctgagcaggttgtccttctagaattgtcttaatgcatacatttgcagtcccttgtaaccttgttagactgcttctttcatgtagatgttttaaatttttcatagtgtgttgtgtacttgttcaaacgcaaactccccaagagagattcacttctggcaccttcatttttgcttttcatttcccctaatacattgctggacacttaattggtgttcaataaacatggtgaattcatttaacaaaagttattttgcacctaccatgctcacggctacaaatggacagcattatcacagcaactggacattacatagcatgcggaatggcagatggacagaccatatctataatatacttgggtaaaattttgaatgtttattagaatttcatccactgtctcatgtcttatagctacaagttaatttccaaatttgaatatgtccatacttgtttattaaaaagctggggacgatactctgtgagggtttctaaggagcatttgataaggtgtaaaaccactatagtcttggattcttctcattgctgagcagaatgggatgtgtcctgcagcaggttgagtggctctatgtggttttatgaccatacgtaggaacctgcttcttctcttgaaatggctgttttgttttatggagattggctagactggcaggtgacaaggcaagaggtgggctggccacgagagccagctgagcagtgcgagttggtgtgattcagccatttgtcaccaccatattctgccatagatagatattttctattcgagaaagtggatcaamtttcactgtacaccactttctcactakgstagaaatacatgaatggtggggcatagttcactccaaatmtgatccatctaaacttttctttctggtgagttgatctgttttgagattttacactttacataaaaatagtatagcagccactctttgccagtcacaaaccacctttagctgagagtattatcatatcaattgtttcaaggaaatgacaaatgagtagttaccaaaaaaagaatgaatgaatgaataaataaataaacacaagggaatgagttgttactagacagagaagaaaaagattgcttggcatgtcccaatttggttattgaaaatttttatttttgatgcagtgctcttcttttttccttccttccttccttccttccttccttccttccttccttccttccttccttccttccctccttccctccttccctccttccctccttctttccttctgtaacttaacacctatttgattttttgaaaacattttttattagatgcttagatcagctgggacaacttaaattgcaagctaccagaaatatcatattaaactaaccagtgaagatgacagtttggatcatggaggtagggttgatttcagctgaggtttgctttagcagttgcaacactgtgatcaagatctgccttctctccctccatttcaatctagtttcctggccttggctctattctcagcaggtcttgtcttcctgttcctaaattggccatgagcatctcattccttattctaatccaacagggattatacctgttggtatacctactcctcctacttcctcccttagtctgtgggggaaaaaaaaaagaaagaaaagaaaagaacttctgagcttcaatgtgattaggtcatatgcctatcactgaactgatccctgtggatagtgatgggattttgctgataagtctcagtctcagcccccttccccaataccaccatccactttaaaggttttggtttaaataaatttcccttgaaaaattttttgggggggattggatgcctaaatgacaaatttggtgtcctttcccaggaaaagggaaattttttccaggccgtcaaaaactaattaaatgtcctctctaaggtttcattactaagatagcacacagtttgctgctgctcctcctctttcttcttttttttttttgagacagagtctcactctatcacccaggctggagtgcagtggcatgatcttggcttactgcaacatccgcctcctgagttcaagtgattctcctgcctcaccctcctgagcagctggtattacaggcacacaccaccatgcccggctaattttttttgtttttagtaaagagggggtttcaccatgttggccaggctggtcttcaacttttggcctcaagtgatctgcccccgttggcctcccaaagtgctgggattacaaatgtgagccaccgtgcccagcccacattcttcttaaagggtttgagattttttttggaaattacagggcatatagctttgtgctttattcaaaatgtcatagagcttcaaacagttcttcctgagacagatgtaaaacaattttaagatttctgagaagtaatttatatatccttataatagtcataccatgtgaaacctggcctgctaataataagaagaaacatctggaactagtgacagggtcaattttgggtattctctctctatggagaggactagttcttctgagattgatgttggcagtttggaatcttttcccagtgggaaggaagacttagaagaggatagttgatattgcctctcctcccacaagcaagtttcatctttatcacagttccctatggctatgccattttgagatttgtatacaaaccctgtacattagtgagggactcactcagagaccacctagactccaatcagtatccagcctttaggagatggcttgacctgggcagcttccccagtgatggagtttacaaaggatgacaatgaccatattttaaatctgttgttactctcttgcaagactcctctttttctcttgcttgctcttcaccttagcacgtctgtacacacctgcctttggtataacttgaaagacagccctaattgaggcattcatctcatacaatccaagagtcaggaacacagcttttgtaaggaatgcattgtggattcttcagatgtgatttaatgaatatccaactgtacttggggactaaaaagagcatttttaaatgagattttgctctgaattggaaagtaagttgaggtgggaaataagccagccattaaatgctctagttttttttttttttttttcttgagatggggtctcagtctcactctgttgcccaggctggagtgcagcagcatgatcatggctcactgcaacctccaactccccatgctcaggtgatcctcccacgtcagcctcccgagtagctggaactacaggcatgtgccactatgcccagtaaatttttcataatttgtagagacagagtttcgccatgttgtccaggctggtctcaaactcctggactcaagcagtctgcccaccaaagcctcccaaagtgctgggattacaggcatgagccatcgtgcccaaccatagattttttttttcataatggcagagaatggctgcaatttagggtctttcttargttcttcctcatccatttcttgcagaaaatttagtactttgtatttctttcaataatttcaacaattttatcctgacttttcccagagcaaaaattaggatggggatgttagagcttcctttgagcaggctatcatcgcaatgaaatcttgaccttgccccttgtagttgcctattgctttataaaacttgttattgaaattgcaaacagtccaaattatatagtagtttctaatgtactttatcagggtgtcagtttttcttttgcaagtgttttgaggagatcagattgttaatgaacattctttgagaatctgaacctgagaactgtctctttaggatgaagttaccaaggacagatgcaaaatttgcaaagatacggtgttccagcctcctccaacaaaggttaacaaccacccgagaaccccagtgccacttacctaccacctcttacctttggaagcagattgcccagtgacggataagtgtggaaactgttcaaagattgggaaagaaaattgttagaaaaggcacatagagaagagtgggattgggggcaaaaggagaaggaggatagtcttctgtgtttttttgattggttaacttaaaatctcagctatttgtttacacaaaggctatgttgatgtccatattcaacagatacaggtatttggctcagaaaagcacatggttcccagaccatttgccaaatgtcctatccttgttcagctttggttattatgaatatccttctggaagcaactgacacctaacatgtctgaatcctctggacctgtagagttcttaccccggagtgattacaatttctgaaaagaacatccctgcaaaattagctttcaaaatacgtgcagataagcccatagaactgggaattcctccagggaattatatcctaagtagcctactacaatgcttgattccttgggcaccagtggttgctcaataggttttttaataataaaaactagaaggaaagaactattgttagctaaagttaccatgtaataattggcttgggtatgtccctgcttgtttgaattgcttaatgtctgttctttgcacagcagaaactcttgtgccacttcctgattagtcatcttggtcttctgtttcctgagctgtgctccatgatctcgtgtaaatatatacaatttgtgataaaatcatcttgctcattccatagcaggtataagtgggttaattctattgggaaacaagctcaaattttaacagaagtttttctttgcttcaagggaacgagtttcccaacagtgggaattttaagcattttggcaaatcaataggggagatattttcaaaccagcatgattctatttggctcaggtaaaagtaagcccttctggactggcttgcaggtgggttcttgagtcttggcttatttaaaaagctgctgcctgttcttaataaatgccatgatatgaggcaccatgaacaagctggatttaaacctgccctatcaataattttactcataagttcttggcaagtatgtttgttgtctgctgtctgcctgtcaaggttgtcagttagctaagcatcagccaaccacatgatgctgagtccccatgattaatctgacttggtaatactgttcatctatgtaaagaattggaaaaagtagatctcccttcatggcgttgtgcgcgcacgcgcgcacacacacacacacacacacacacgcacaccaatttgtttaaaataaaaaaagattagacgaaagcataaaatcagccctctggtctgaagcaattaatctgtagaagatgctacatatgctgggtgtagtggctaatgcctgtaatctcagcagtttgggaagctgaggtggcaggatcacttgagctcaggagttcaagaccagcctgggcatcaacacaagaccttgtctctactaaaataattttctaagaatagctggatatggtggtgtatgcctgcagtccctgctgctctggaggctgaggtgagaggattgcttgagcccaggagactgaagcttcagtaggctatgatcacatcactacactccagtctgtgtaacaraatgagatcctgtctcaaaaaatttaaaaaataaaatgaaaaagaagatgctacgtacattatacacatataaattagtaaccaaatggtttaacaacctcagtgattgtgttgttctgtagtttgatgacttttatcttgctccttctcattgccattgattgtaccaggttatttcctggagcatgttgtatatcaaggtttatgcaactgtacatttaacctttcagtgcctagctttccccttttcctatagaatcacaagaatttgaaggcaacacaatatgttttctatcttatagtctgaagttaatgcatattaatggcatgctgctattactagttaatactgatgccatgaggattagataatcattgtaaaaaatgtttaatagagcattttttacaatacttagtggatgccagtatactaaatcctttatatatgcttaggtcttttatttcccacaaatctgtgaactaggaattatgaacgcattttacaaaacaggactcgttgcataacttgccaagtcacacagctaatgaacaggagagtcagaacttgaactcagggttgcctgcctctaaagtcctccactaattctcattcattctgtaaaaatagaacatggcctctagaatctcgtcatttagaaaagaacagccttttggagattggttagctggtttgagaacatgtagtttgtttatctgtgtctttgactagtaataacgttcagcctcattaaatctagtaagctaaaaggaagcaggaaatggctgtagtatagacgcttgatatttcagcgatgataatgatggataataatgtgatttcacagcttgggttatcagacccaggtgagtggataagtggattcagattcattaaaatcaccgggcctagtttgtggccttcctttcacaaaccccttaggctgcatattaccctttaatagcatatttttcccattatagttgcccttgctattcatttcaaccacattacaagtataaacatgtacaagggagaggacagatgtccttcccttctgtattaactctcttgttgtatgaaataatgttatgtattaaattattgtctcagtttatagagtctgctagactgtgctgttcagtagaactttttgggatgatggaaatgttcaatgtctgtactgttcactaaggtagcaactagttacctgtgttagttgagcgagcacttgagatatggatgatgaaactaaagaacagatgtttaagtttatttaacccatctaaatttaaatgtaaatacccacatggctggtggctaccttattggacagcagagatttagaatagtaaagctgaatggaccttagagtacatgtaaggcaacacattctttttattttagaggaatgtaggactcagagcatgaaaaggagtaaaaccaagcctaggatcctggtctcttgacttctagttcataatttcttccactaaacttaaaattgttaaaaatgttactttgaactttagtatttgaagattatcgtggtaagactttgcttatatttacaaaagcattgtaacagaaaataaattttgaattacaactgtgactttatcatatttattttacattttatgattgctaaataggtcatatattgacgtctttacatatttgttgggagcaaaagagttgaaagtaaagttttcttcccatctatgttatttagccattgattcccctctccaaagggatcagtaatagtttctttgtgtatctttttaaacattcagatatattaagtatttaaaactgtgtattgttctctcatctttttaaacaactggtaggatatgtacactacacattcatatttttgcattaaacttatatgtggagatcttttgatgtgagtacacaaaaagggtactttaaaacagatacataagcttctattgcacgtaccaactgtagtttaatgcatccctatcgatgaatatttacttcctttccaaagttttctcttaaaagtaatgctgtagagaataactttggacacataactttcatgtgtgcaaatacattataagataattcctagaaatgaatgcactaggtcaaatagtatatacacattttaaattttgataaatattataaattgctctccatagagtcacagcattttatattctcactgacaatctgtaatctctatgccttcatcaacctagtgtgttaccaaactgatcaattcataccattctgacaggtggaataaaatctcagtgtagtttaaatgtacatttttaaaaattgtgaatgagctgggcatcttacatatatgtaagggccatttgtattttatttattgtgaaatatgtttgtatgctttgtccatttccatcagtttttaaaattgacttagaggagcttttatatataagacaaaatatgacatatatggtaaacaaaatgcaaacattttcttcagttgtttgcctttttcactttgtttttcatggtgtttgctatggagaaaatataaatttttacataaacagatatgccaatctttccttttatagcttctggttttttgagtcaaaaattgagagaccttcctcattctgagagtataaaatagtaattatttttaattttaattaatttatttttattgacacctaataattttgcatgtttatggtttaccatgtgatgtcctaatacatgtacatattgtgaaatratcaaatcatggtaattagcatatcaatcaccttaaacatttatcattcctttgttgtgagaacatccaaaattctctcttctggctgcttgttggcagtagtcaccttactgttcaacagagtactagaacttattcctttctatgtaactatatctgctgaccaacctcttcccatctcccactccctcctattctccctagtctctggtaactactgtcctactttcaacttctatgagatcagtttttctagattctacatgagtgagatcatgttgtatttttctttccatgactggtttatttcatttatcataatgtcctctagcctcattcacattgttgcaaatggcaggattttatcctttttgtggctgaatagtattccattgtgtatatgtactgtgttttctttatccattcatcccctgatggacacttaggtggattctgtatttcactattgaaaatactgctgcaataacatgagcrtgcagatgtctcttctatatactgatttcctttcctttggatatatacccagtaatgggattgctggttcatatatttttaacattttgaggagcttccatactgttttccacaatggtagtactgatttacattcccacgagcagtgtataggagttccctttcctttacatcctcgccagcataataacgattttaatatatttggaatttattctaaagatgtaaagtatgactcagacatcatttattaagcaatccatctttttcccagttatttgagatcccacctttatcacataaaaattttaatatatctttgagtcaacatctcactttgtagtctcttccatggaatctgcctattcttgcctgtaccacctgttttaattattttagattttatagtgtactttaatatattgaagaactattctctcattgctgcatttcttttttaggctgttcttcaccactgttacttgtttatattttgtatgaaatttagattcagcttgtctatttcaaaaacaatttctgttggtatttttagtaggatcatattaaagttcaagattgatttagagactttcgaaaagcattgaatctttctatctgggaacatgatatgcctttccatttgtttaagcattcttttatgttttctgtcagtgtttaatggttttcctccaataacttttaccatctataatttagcttattcctacattgttcttttttatgtcttcaaaatgggccttttgcatgtatgcatcaaagctattgacttgtattgattaacttgggcctcttctaaattttttcactttagaaaaaaaatattttagcaattggttattttatgttttccaaagacctaaatataaatgtacaggtgatgaactgcactttttcctttgaaatttgtatgcctttactttctttctctgatataattgtattcactatttcctccagaactagttaaactagagtagaaatttttggcatttttttggttcctaatcaaagttggaaaaacagacttttcccttgaaatgtagtgctggcatttaggttgagatagaaatatttcattatatgtttttaatcaagaatggatttgaatttcatcaaatactgtttaaacatctatgataataatttgaggtctccataggtttattaatatcataaatgaactattttagccttataactttaaaagccttattcttttaaagttttattcattctcctcccattcttgttcactattcgttgcccattcttgttctatataaaaaccccagtggtccctgctgtgaattcaatgacatcttatttcttttccttaagtcagagcaaatgtgcacatcagaagagcaaagtgtcaagtaatgatagctggaaattgagccacaaataaacagaaaatattttcttcattgttatttgtgtgtatgcttgtgcttctttttttcaagggagtagaccactgttccacatgttccacagttgttttatggtggaatgctctagttatggaaaaggagaatggagtctagccgtataaagttactaaacctgcttggatatgagtcaagggtatcctttttgtgcccaaactagaaaacctttccccttctcatatttttgagcaaggtgttttatgttgcaaagtagcccactgtctcttttcaactgcataagcccaaataacattttatattccagtcagtcacaaaatgaaaacaggaaacgtctttgaagcaaggcaaaaatgtcagagtgtctaaaacatagaagtacttggtgaaacactttcagcgtcttagctctgcctctggctagtcatttccactcgctgggctcagtcaggtctttcattagtgaaacagaggtggctgagcacttcctgtgaaatcgcagggacaggattgtggccctctggagagggggccaggaggaaaaggaaccagacagctggttttcgggagccaccagatgggagcaaatttccaaggctgctgagaagaatggtctagaataacagaattgttttgtgaaggagccttcctaaaccaaatgttctgagcgtccccgcaagcagagcaaatgagcacatactgtgttcatggggaaaaggacaaatgactgtacaaatggagtaacaaacaatttacgaaaatgtatgtggcctaaatttagtatcaaggtgatgggcaaaatgacttacaccaatttgtgacggtcctgttgcaaattcaatgacaaagccagccagtctacctagtccatagtatccagcagatatatcagtggagatggcccgagtgcaggctgcttaaataagataaatcatctgtgaagaaggaaaaggtcaaatgtgctattctctgtctttttttttttttttttggtctgaattaaatggaaaccattacaatttcttccaagaaaataaaaatcagcacctacaataatgctgtctccttctgaccctgccaagtctgactgcattccacctggaccctgcctttgtctctcatgtttttatccaagaataagtaggctaccttgtagtaaacaggaaatcttactcttacctcgcactagttagttatgcgtggtacttgatccataatcttctgcccccatgtcatagaagataggtttttccaactctcagatggaaaatcactagtgcactacacacacacgcactcatgctcagaaatattttcacagatccatttttctctgtgtgacggaggttacataattatatcagtggatgtcctgcagtccagctggtatatgtagagcaactgcatgtttgtatcactctgttaggtgcagtgtaggacacaaataaagagagagaagggagagaacactgccgagtcattaggggcatgctttcagttcctatacagccaagtttttttttaggcttggcctatgcttttttcttagtttgggtttagtatgtattcattcattcatattgccatgtgtgttcaacaaatattttgggatgcctgctctgtgccagacattgtgctaggttagagggatgcaaagacaaattagaactccttttctcaaggagacttctggttattgtatttgtgataaagttttaaagttactatactttgcctgcctagaatgtagttggatctcaaaagaattactgagggttggaggtttgagtggcagaagagcaatgattgatgaaacagagttttgaaagatgagtggcctatttgtcatggaggtaggaatggggggtgggtgggcttctggagagacacagcagaagtgtagagaagaccatggtacttgtagggaacttctgtggtttagagtgagatggatcttgcaagagctcaggctggagactgagaaaatgctaagtcatggggggtcttacacaacattctagagaatttagactttcccctgtagacactgaggggccgtgaacagcatttgtacctctgcaagatttttctggcagagacatggaaaatggtttagaaggtgaagataaggagctcaattagtgggctatttaaagtgtgcaatccacagataaaaggcaaaaacaaaacctgaatcagaagagtataccagaaaagggtgccagcctattatatatggcaatttatgatttatttaacattgaaggaaaaaacaggccttcaaaaataataaaataagaaggtgctagctatttacccctataacttcaggtacaagaagaatatttttattttactgagctcctcaactgatttaaaaaattaatactcataccagattgtaaataattcaaggaatcatagccccttccttactttttttacatttgtaagatttaaagagtcatacacccagataacatcaggctgcagagttttagagaccaactccttcagtgatttttcaagatgagaatgttctccatgttctcctgcagaagcttctctgggagccccaatatgtacaagagacagaggtagaccactggctgtgccttccctcctcctcctccccattctactcagctctgaattgcagttgcatagtttgcaaacttaatgttgtcaaaccttgttattccataatgggggcatagttgtgcaaactggaagtgattgatttacccagggacagaagacttggttaatagtagaaaaggatccctaggttccctaattgttggacaattgctcttagcagttttggttaacctggtttttatctggcttctcagtagagatgattctttcataagatcacctgcacacaaccagctactcatatatttgcttatatgtgtcatatctgatttatgtacattttctgtagacaagcttgttttaggtcatgtacttattacttactaagtgtttgttttctccatacttggggatctaaattagtaagcaacaaactgacttggtgggttcaactcaataatatccaatgaagccatttcttcccattcctaaatcctaatttagctgtgggaagtttggatcaatggaaattaaactccatatatgccaacactatgggttgataacctcttccaagaatcattgcctgaccatcatgttccttctacctgaccactccttcctgcacttttatcacatattactctaagggatcatgtctaactttttgtcttcctcaattagactgagtatttcttgaggccaggaaatgcatcattttatccatagcatctaactcaatatctaatgtgtaataaactcttaatagaaatttacttaataactagatagatagtttaagatatgcccttgatgtagtcaagaagacaaaatgtatgggtacatttccttcttgtgtctggttcctctttctgcattgtcagggcaagttttaccctctaatttcttgtggaccagcagctgtcttaattgacagtcccaccaaaccctggatttcataggatgtcccagacaatgagaaatggcttgaagatagaaaattgtctgtgtcttaaaataatcttctataaattatgcgtattaacacagatatgtagcaaactataaaggttattttgctctgaagaggaattcagaattagaacttggatgtagcaggacacctctgttctcattgccataaagaaaaaaaaaacaccttttatattgaatttcagtgaaccttgcagccagcatctgtcccattaattttcatatacgagaacaatgtggcatgattactcaccagcaacagaagtagcagttttataaatcttatgttgtagtggctggaagggacagggttgtgctctcattgtttccatattctttgtgaaattcacctttgcagggggtggtttgctctttctcttccagatgtgcacagaaatatgccatgtcactaaacgtcatgtggcttaacatttctccaattttcagctaatctactgagaaagtagtaattttttctgactagtggtggcctacttctcctataaggctgtcttttacaatgagggaagttggcctcactttatttataaaggtgcacctaaggctggtgctttctggttctggggctgcttaatccaccctctgtttcatttgatcctatagagtttgggggagggctgaacaacagtttcattgacgtgattcagattcaatttgctaagaacctgattgtgtttatgacattaataagaaacactttaagccttttaatacgaatccccagtcactctgcttcttccctttctactgatgatactttgtgatctacatagtttaaactttcattacacaaggaaacttctactaccacttgatgtgtgtgtgaataggctatggggaaaaaaaggttcatttttgtttgagttttttacttttcataggtcattgtcaatgtggtaagtatgctctttagtgggatgatccaacactagggcttcatattcaatatcatttacagaaatagtaaatgtcaataacagctaatgttcattgagtgctaatcttccaggtactgttcaaagagttttacctattatcaactcaattctcccaacagccatatgatgttgttactgttattatagataaagccacttaggcacaaagagattaagcaactagttcattgttacagagttggaaatggaaagccaggtcctaacccaaatgctstgttgcgcacttctctgctgtctgcaggtgggatgagaggtgggtgctgagctgcctcctgtggtgctgttttgaaacctgcccatcccaaagctaagggagtatcgctgtgctaaagggttcagtcagcagccttgccagttcggaatcccctagaaccaccctccatgcatgtcatgggcagctctctgagatttctggtgcctcttactggcttgttaagttggcagatttttctccccatttgcttccttcattataaaattcccatttccattttgcctctaggtagaagctcatggaactcaaatgggaaatgatgatggtggattttcctgctgaaaagatgtacctcaaaaggaaaaaatagtgtatttaacatggagaaatgaaatcctccgaagggagcttcatgaactaaattacccagaatggccttactgtctgttgtcagcatttttctgctgcccctttgagcatcagtttactcactcatgtgtgggtcagctctactcatctgtgaaggtagataataaaacctacccccaaaaggttgcagtgaagattaagtgatgtcatatttttaaaaatgcctctgtaggctctggtacattccaatggcttggtgaatttttttttttccttttccttttccaaagggaattaaaaaaaaatgagagtgagttttgaggatcctagagcaagtaatcccagcactttgggaggatcatgaggtcagaagttcaagaccagcctggccaacatggtgaaaccacatctctactaacaatacaaaaattagctggatgtggtggcgggtgcctgtagtcccagctacttgggaggctgaggcaggagaatcattcaaacccgggaggcggaggttgcagtgagctgagatcacgccattgcactccagcctgggcgacagggtgagactccgtctcaaataaataaataaataaataaataaataaataaataaaacagcaaagcttctatgaattctccttttagcccttcatataagtctattcttcaggagccagtttatattttatggttagatacacatattaaattattggtatgtcagatatgattctattagtagtctccagggttcatagcttgttagggaaaatcctcctaaaaagaagttctttttgtctattcttcattaacttatttcacttgtaaagcattaaaatgggtcctctttacatattatgttgttttctaagggacaaatactagtggttattattacagttctttttttcatgtttggtacttcagtggttgattaactgtttcttaatcctgaaatgtggaggaggtttttgcaagtggttgtagcctggttttgaatgaaggtgaaaatgctctttttgttagctctagatcagcagaggtgaataagcatcatgaatttaggagactggcgtttttttttacataaaagttgctttgttgctaattagtagattagaattcctttaattgcattctgaccaaagacttttgggtgttcaggagggcaagttagcatgtgttgcatttgaatttatacatttgagacacattttcttactgaagctgatattcatgaagcagaaaagataaaaacttgtacatacctttttatttcttgattttaatgttgaagttctattctcagaatggattttataggcaacaatatgcacttaaatttatgatctgtttacgagacctcactgtattttgacagaggtcaaaataagggaaatcaatcttggttctcattccaaagagttttttttcctgatatcttaaaaaggctttattacattatgttgatatccatggcagagagttccaaagacatccccatgaaagggctataaatgtgaggtttgaaaccaaggcaagtcaagcagggtaagcaatcttttcacccaaggttttaaaataactgctgataagaccttctcacagattttcattcatttcttcctagttataggcaggaaattctgaaagcaggtgaattctaaaattaccttataacttgatttcagaatatagttacacaaagtgagaataactcgatgaggatgctgtttggatcttgagtactgtaagtcctgtggtttaattgacgagttgatggatttcttttatgcctaaattcaggctgaaaggcctaaaggccacacgaggcagtttatcacgagcgctattctccgtttttatattmtggttcattaccagccccttcctcagtacttctatttatataatgttgttctggtcaaggtttatactaaatctcttttaacttcaacatccaacaaatatttttaaggactaatgtgtgcaaaacattatgctaggtgtttcctaaggcttcaaataacttggatgccagttttggactgtaagtgctcacaggataatagaaaaatcttgtttgcaaataactggaacataatgtacaatggaatgtgtcataaggggagtgcacacaatgctgtaggaattccaatgaaattcaccctcatctttcattgtattccctgttatttacctctccttaaaagaaagaactataagaactctacatcttttagtggcgatttcctagatagaaaaataatgaatattaaacatgatgtgttaggattggtgaggctgaagaaattctatgcattttgtcatttagtgaatatgtattgactgcctgcctattcagtgtcaagcactataggtggtaatgtatcaagaggttcatgaactaataataaaggggcacctctgtatttcacaaatatttgctgaatgaatgaactcattatattttattctcctatgtgattcctagataagttctgctacctaaaggaaagcacttatggaatccaaggtttggaaagggcttgaaagatcacattaataggtttcccttttatttgcctttttgaatctcaatatggaataactttgacttatccatactaaattgcatctcattggtgttacacaatctttccagtttttcaagattatttttaacttatgccaacaacatattaaatatcctttccatctatgggacccattccattttctaagtttacctaagactttaaaagacattaagccatcagagccaaaaacagagtttctctacttccatgttgatattctccttaatctacacttccattcattcaataaatatttactttcagggtgttcggatgagctatgggttacatagtgatgaattcagcagacatagcttctgccctcatgaagcttacagcctacaactacagaggatggggctgttgaagcagctaaaaaaccctaccttttctactattgagcaataaaagaaatgtttttcttgaatttctgagatcatttcttgccagtctttgctcatgtcactacctggaataaactcccttttatcatattgggttatcaacatcttatacattcacaaaagaccacataaatgttaccagctgcaaaaatcttattcatgtctgtgaaatccattaacatgtggcaccacttgagttgggctcatcacttgctgatttctgctgtcattatttgtgaatgtctaatttcactgtaagctcatactgtcctttcaaacatgaatgaggcctttaacattgttgtatcaatccataacattgaacataataccctgtttgaggaggcatgactatagaccctttctgtccaataataaagatgttggtaagagtaaataaaaggtctcatttcttgataaactggttagaatcaaggaggtctgagcatgacactagggttcctaaatactttcattctagacacataaaacctctagaagattaaattcagacaattttaaactttagatacacattacaacacaaagaaatgcactattataaattttaatgggggaaggccggtaattcaggaaactgtcagatctgaataatgaaataccagatagttcttatctatttacatactctgtgatttctaacactctgaacaataatatttcagggttctaaatattggttagatttttaaagttttcgaaattatataactagatgactgctctcaaaattaggccggtattttggattacacagagtgcctaaaagtgcatttttcctcctgaaggggaaagccatgtgcctagccaatattttcattccctaaggatccatggaattatgatagcttaccctcatcagtcacccaggctcccattggtgtgaattgggcaatgctgtttacatagcaaatacacttccttttatacaagggtccacaacccctgggccatggaccagtatcagttcacggtgttaggaactgggtcacgcagcaggaggcgagctgcaggtgagtgagcaaagcttcttctgtacctacagccactctccattacttgcatcaccatctgagccctgcttcctgtcagatcagcagcagcagcaaattctcatagaagcatgaaccctattatgaactgcacatgcaagggatctaggttgcacattccttatgagaatctaattgctgatgatctgtcactgtctcccatcacccccagatgggaccaactagttgcaggaaaacaagctcagggctcccactgattctacattacggtgagttgtacaatcacttcattatatatcacaatgtaataataatataattgaagtgcataatatacataatgcacttaaatcatctccaaaccatcccccactgccaccctggagcatggaaaaattatcttccacgaaacagatccctatgccaaaaagttggggattgcagctttaatagactcagaggcatagtcttagagtgtaacaaatgcacaaaccttttcttttaaaacagactccagagggattgaagagagggaaccagtgataatctatatgcccatttcatggcagacatgctgctgtgtgctttccatgcattatatcattcakccaacaggcatctaaagaatatagagtcaagaacagttaagccattgccacaagatcacctagctagtaaatggctcaaactcagtgactcaaacccaggatttccaaccttaaataaggctctcactcccacaccgcacagctgcatatctgagtgtttatcagtgaattacattgatgtaaattcatttatgaaaatgtcaagatatcgtgagcactagtgcttttaggagagaatatttaactcatttcagacaacatatattaacttcatcaaaagtttgcctgttataaacctgtgactcactcttggtcaccatgatggtgcaacagctgtccactggacaaatactaaataatattttatccttgccccctatttcttatgagaaagccacaatgaacttccttttgtctctcatttcacccttaaagggacaaatagcattgcattatccttgaaagggtcttctgctgacccatctttgacgcttccatcacagggtgacgatgggatgtttgctgtatcacacttccctgtgctttcatgaatgtgttactggtgatgaagaatgccaattctttgtttagtagcagtttgctgggtctccctgaaaataatgtgtcagttaggctacctataaatctgagtcagtaatgtacttctctaaggtatatttatgttttgaatttgtctctgagcaatctgttggggggaaattttgctttaatatgttttataaaaaggtgagaaagtaataaagtgtaatgaagataagataaattttctaataaaataaaatatagaagtgttcaaaatttttgctttccccatatgactttgttttttccccaaatgttaccctcataacaggtgggttctgtctcttgatgggtatcaacacagtgaccacaaccgaggaggatttagcaagggaatcttactacttgtaacaaataagggaaacaccaggagcaattcccaaagcagtatctctccaagctggggggcagtcagattttataagtgtagggtaataaggtgtgatctgattggattctgcaatgaggtgttgtcagaaggcataatctgactggattttgccatgggatgatggcagagctcaatctgtttggatcctggatcctgccattgttgtgtctgcttttaattcagtccctactccttggtcagagcacttaggttccccctgtggttgcactcttggttcttccgcacatggtcaggttatgtgacctgagggtccatggcaactgaaaaacaagaggaactttgttacataaaaaattgaaccagatttgcctggcatggctacacaaatggatgtctctgttcagccttatttatccacagtttttcctcctgctgatccctttttcttgcctgtcctccctgcctgctcacttgctttctggcctctcttgcctctcttcttagccagagctgtatagggatttagttcagtgtttcctccttcattgtcattggacaatattcactcatcagctccaggtcacctccctgtcctcacctgtgaccagtcttccttccaggttcattgccattttcaaagtgagtctgcactctctcaccacccgtttgcttatcacccactctctatgtgattacttgtgatttgacatctgcccatgctactacaatgaaatggctttctcagagactatcatatgtctctattgacaaaaccggattagtgctgcttattttctgcagtatttactgttgttggacaccgcttccttcaactttctcctctcttggttccagggcactatactaactttggtggccatatactcagtgcctccttatacatgagtggaagtaaggggttcagaatgaaatgattcagtcagtctcataaagagataggacatctgtggagattaaagttctcagagttagtagtctcattgctttattccacatgatgttgacaaagaagtagaaagggaaagccaaatccttcaatctatattgctaattaaaaaatgattttcttttcttctttttagtaaatgtttgatggtgtcttgggagtagccttagtagcaaaaggaaatatttatgcatgtctttgggaaaatgtctttccattttctgtggttattgtatctgtaaaaattggacaccatttcttaaaaggattatgtgaaaattttatgatgcctggttggtgaaaggcagagtgtcctgaaatatctaaaatgtagaatcatattctttctattgttttgatataattagaagtgtcgattttaaaattacactgaaaggcattttatttttaacattgttttattaggtgagtgcaaaagtaattgcagtttttgcattgttgaaatttgccatttgatatgggaatacattcttatttttaattaattaatttattattattatactttaagttttagggtacatgtgcacaatgttcaggttagttacatatgtatacatgtgccatgctggtgcgctgcacccactaactcgtcatctagcattaggtatatctcccaatgccatccctcccccctccccccaccccacaacagtccccagagtgtgatgttccccttcctgtgtccatgtgttctcattgttcaattcccacctatgagtgagaatatgcagtgtctggttttttgttcttgcgatagtttactgagaatgatgatttccaatttcatccatgtccctacaaaggacatgaactcatccttttttatggctgcatagtattccatggtgtatatgtgccacattttcttaatccagtctatcattgttggacatttgggttggttccaagtctttgctattgtgaatagtgccgcaataaacatacgtgtgcatgtgtctttatagcagcatgatttacagtcctttgggtatatacccagtaatgggatggctgggtcaaatggtatttctagttctagatccctgaggaatcgccacaccaacttccacaatggttgaactagtttacagtcccaccaacagtgtaaaattgttcctatttctccacatcctctccagcacctgttgtttcctgactttttaatgattgccattctaactggtgtgagatggtatctcattgtggttttgatttgcatttctctgatggccagtgatggtgagcattttttcatgtgttttttggctgcataaatgtcttcttttgagaagtgtctgttcacgtcctacgcccacttcttgatggggttgtttgtttttttcttgtaaatttgtttgagttcattgtagattctggatattagccctatgtcagatgagtaggttgcaaaaattttctcccattttgtaggttgcctgttcactctgatggtagtttcttttgctgtgcagaagctctttagtttaattagatcccatttgtcaattttggcttttgttgccattgcttttggtgttttagacatgaagtccttgcccatgcctatgtcctgaatggtaatgcctaggttttcttctagggttttcatggctttaggtctaacatttaagtctttaatccatcttggattgatttttgtataaggtgtaaggaagggatccagtttcagctttctacatatggctagccagttttcccagcaccatttattaaatagagaatcctttccccattgcttgtttttcctcaggtttgtcaaagatcagatagttgtagatatgtggcgttatttctgagggctctgttctgttccattgatctatatctctgttttggtaccagtaccatgctgttttggttactgtagccttgtagtatagtttgaagtcaggtagtgtgatgcctccagctttgttcttttggctcaggattgacttggcgatgcgggctcttttttggttccatatgaactttaaagtagtttttttcaattctgtgaagaaagtcattgatagcttgatggggatgtcattgaatctgtacattaccttaggcagtaaggtcattttcacgatattgattcttcctacccatgagcatggaatgttcttccatttgtttgtatcctcttttatttccttgagcagtggtttgtagttctccttgaataggtccttcacatcccttgtaagttggattcctaggtattttattctctttgaagcaattgtgaatgggagttcactcatgatttggctctctgtttgtctgttattggtgtataagaatgcttgtgatttttgtacattgattttgtatcctgagactttgctgaagttgcttatcagcttaaggagattttgggctgagacgatggggttttctagatatacaatcatgtcatctgcaaacagggacaatttgacttcctcttttcctaattgaataccctttatttccttctcctgcctaattgccctggccagaacttccaacactatgttgaatagtagtggtgagagagggcatccctgtcttgtgccagttttcaaagggaatgcttccagtttttgcccattcagtatgatattggctgtgggtttgtcatagatagctcttattattttgaaatatgtcccatcgatacctaatttgttgagagtttttagcatgaagagttgttgaattttgtcaaaggccttttctgcatctattgagataatcatgtggtatttgtctttggctctgtttttatgctggattacatttattgatttgcgtgtattgaaccagccttgcatcccagggatgaagcccacttgatcatggtggataagctttttgatgtgctgctggatttggtttgccagtattttattgaggatttttgcatcaatgttcatcaaggatattggtctaaaattctctttttttgttgtgtctctgcccggctttggtatcaggatgatgctggcctcataaaatgagttagagaggattccctctttttctattgattggaatagtttcagaaggaatggtaccagttcctccttgtacctctggtagaattcggctgtgaatccatctggtcctggactctttttggttggtaagctattgattactgccacaatttcagatcctgttattggtctactcagagattcaacttcttcctggtttagtcttgggagagtgtatgtgtccagaaatttatccatttcttctagatttctagtttatttgcgtagaggtgtttgtagtattctctgatggtagtttgtatttctgtgggatcggtggtgatatcccctttatcattttttattgtgtctatttgattcttctctctttttttctttattagtcttgctagcggtctatcaattttgttgatcctttcaaaaaaccagctcctggattcattaattttttgaagggttttttgtgtctctatttccttcagttcttctctgatcttagttatttcttgccttctgctagcttttgaatgtgtttgctcttgcttttctagttcctttaattgtgatgttagggtgttaattttggatctttcctcctttctcttgtgggcatttagtgctataaatttccctctacacactgctttgaatgcatcccagagattctggtatgttgtgtctttgttctcgttggtttcaaagaacatctttatttctgccttcgtttcgttatgtacccagtagtcattcaggagcaggttgttcagtttccatgtagctgagcggttttgagtgagattcttaatcctgagttctagtttgattgcactgtgatctgagagatagtttgttataatttctgttcttttacatttgctgaggagagctttacctccaagtatgtggtcaattttggaataggtgtggtgtggtgctgaaaaaaatgtatattctgttgatttggggtggagagttctgtagatgtctattaggtctgcttggtgcagagctgagttcaattcctgggtatccttgttgactttctgtctcgttgatctgtctaatgttaacagtggggtgttaaagtctcccattaacaatgtgtgggagtctaagtctctttgtaggtcactcaggacttgcattatgaatctgggggctcctgtattgggtgcatatatgtttaggatagttagctcttcttgttgaattgatccctttaccattatgtaatggccttctttgtctcttttgatctttgttggtttaaagtctgttttatcagagactaggattgcaacccctgcctttttttgtttcccatttgcttggtagatcttcctccatccttttattttgagcctatgtgtgtctctgcacgtgagatgggtttcctgaatacagcacactgatgggtcttgactttttatccagtttgccagtctgtgtcttttaattggagcatttagtccatttacatttaaagttaatattgttatgtgtgaatttgatcctgtccttatgatgttagctggttattttgctccttagttgatgcagtttcttcctagtatcgatggtctttacattttggcatgattttgcagcggctggtaccggttgttccttttcatgtttagcgcttccttcaggagctcttttagggcaggcctggtggtgacaaaatctctcagcatttgcttgtctgtaaagtgttttatttctccttcacttatgaagcttagtttggctggatatgaaattctgggttgaaaattcttttctttaagaatgttgaatattggcccccactctcttctggcttgtagagtttctgccgagagatctgctgttagtctgatgggcttccctttgagggtaacccgacctttctctctggctgcccttaacattttttccttcatttcaactttggtgaatctgacaattatgtgtcttggagttgctcttctggaggagtatctttgtggcgttctctgtatttcctgaatctgaatgttggcctgccttgctagattggggaagttctcctggataatatcctgcagagtattttccaacttggttccattctccccgtcactttcaggtacaccaatcagacatagatttggtcttttcacatagtcccatatttcttggaggctttgctcatttctttttattcttttttctctaaacttcccttcttgcttcatttcattcatttcatcttccatcgctgataccctttcttccagttgattgcattggctcttgaggcttctgcattcttcacgtagttctcgagccttggtttttagctccatcagctcctttaagcacttctctgtattggttattctagttatacattcttctaaatgtttttcaatgttttcaacttctttgcctttgatttgaatgtcctcccgtagctcggagtaatttgattgtctgaagccttcttctctcmgctcgtcaaagtcattctccatccagctttgttccgttgctggtgaggaactgcgttcctttggaggaggagagtcgctctgctttttagagtttccagtttttctgctctgttttttccccatctttgtggttttatctacttttggtctttgatgatggtgatgtacagatgggtttttggtgtggatgtcctttctgtttgttagttttccttctaacagacaggaccctcagctgcacttctgttggagtacccggccgtgtgaggtgtcagtctgcccctgctgggggatgcctcccagttaggctgctcgggggtcaggtgtcagggacccacttgaggaggcagtctgcccattctcagatctccagctgcgtgctgggagaaccactgctctcttcaaagctgtcagacagggacatttaagtctgcagaggtaactgctgtctttttgtttgtctgtgccctgcccccagaggtggagcctacagaggcaggcaggcctccttgagctgtggtgggctccacccagttccagcttcccccctgctttgtttacctaagcaagcctgggcaatggcgggcgcccctcccccagcctgctgccgccttgcagtttgatctcagactgctgtgctagcaatcagcaagactccgtgggtgtaggaccctctgagccaggtgcgggatataatctcctgatgcgctgttttttaagccggttggaaaagcgcagtattcakgtgggagtgacccgattttccaggtgccgtctgtcacccctttctttgactaggaaagggaactccctgaccccttgggcttcccgagtgaggcaatgcctcgccctgctttggctcgcgcagggtatgcgcacccactgacctgcgcccactgtctggcactccctagtgagatgaacccggtacctcagatggaaatgcagaaatcacccgtcttctgcgtcgctcacactgggagctgtagaccagagctgttcctattcggccatcttggcttcaagagcgggaatacattcttacatgtggttatgttatacatcattttaataggtatttctcacttgtttttgctaatgacttactacttgctgtttattttatttttattttagactatgaaagtgatgttagataaaaagcaaattcaagcaatttccttattgtagttcaaaatgggtcataaagcaatggaggcaactcacaacatcaacaacaaatttggcccaggaactaacgaacatacagtgtagtggtgattcaagaagttttgcaaaggagatgagagccttgaagatgaggagtgtagtggctggctcttggaagttgacaacaaccagttgagagcaatcttgaagcttatcctcttaaaactacaagtgaagggccaggcatggtggctcacgcctgtaatcccagcactttgggaggccgaggcgggcagatcatgaggtcaggagatcgagatcatcctggctaacacagtgaaaccctgtctgtactaaaaatataaaaaattagtcgggcatggtggcaggcgcctgtagtcccagctactcgggaggctgaggcaggagaatggcgtgaaactgggaggtggagcttgcaatgagctgagatggcgccactgcactccatcctgggcaacagagtgagactccgtctcaaaaaaaaaaaaacaagtgaagttgccgaagaactcaacgttgaccattctatgatcgttcgacatttgaagaaaattggaaaggtgaaaaagcttgataagtggatgcctcatgagctgagagaaaattaaaaaatcattattttgaagggtggttttctcttattctgtgcagcaacaacaacaaacaatttctcaatcagattgttacttgtgaggaaaagtggattttatatgacaactggtgatgaccagctcagtggttggaccaagaagaagctccaaagaacttcccaaagccaaacttacaccaaaaaaatgttcatggtcactgcttggtggtctgctgctggtctgatccactacagctttctgaatcctggctgaacaattacatctgggaaggatgttcagcaaatcagtgcgatgtagtgaaaactgcaacacctgcagccagcattgttcaacagaaggggctcaattctccaggacaacgcccgactgcatgttgcacaaccaacacttcagaagttgaatgcattgggttacgaagttttgcctcatttgccatattcacctgatctctcgcgaactgactcccacttcctcaagcatcttgataacttactgcagggaaaatgcttccacaaccagcaggatgcaggaaatactttccaggagttcatcaaatcctgaagtatagatttttatgctacagaaataaacaaacttatttctcattggcaaaaaagtgttgattgtaacggttcttattttgattaataaagatgtgtttgaccctagttataaaatgatttaaaattcatgatctaaaaccgcaattacttttgcatcaaccttaatatttgaaaattagtaaaattgcaaaaagaaagcccttattagctgttaataaatataaaatatataaaatgtgtgtgtgttaaactaagtgccttgagtatatgaagctatgaaaatgaagacaacagccttactaacattccatctcattattgttataactcctggttccatcataatcttgtttttccatcccaacagaatctgaggtgcagtcatttttgtgaagctgttattttcatcacaatgtgatctatacctaatgattacattacctgtacatctgaagctcgttcgtaaaccatcgtcccctgagagtatacctaacataggaaatactatatatatttggccgctgaagtgctataatgatgccctaaattacatatccctttctacagacataatttgctttattaaaaataacttctgcataactattgaagaataaaacagccacttatgcacaaggtgagggatatctgcatatctgagctagacaaaaagtatgtttgataatctattgtatgttttgctacaaaagcaaagtggttccttatgattggctgaaactctttgagttcttgttctatctttcagcaaatgaagatgctaattgtctttattctagccttttataacattaccttggctcttcaaagtcaaatggaacctggaaaatcgaacttaattccattttacatttttcccttgaccatttcccatggtggggaggtatgtgtctagatttggaaaataagcctgcttagttttttttcccagctcagtgcttagaaacaaccccctctagcaaaaccatgcctaggaaaacaaagtatccagctaggctttcaagrttacttgggggcaagacatggatagttacgtccttggaggaaaataaatacaaggcagtagatccaaatgtatttgtcatgcaaagaacattagctgagagagagcttccatatataggtttgcaaaactgagagcaaagccaaagccattcctgggttttgctttgtgatatagtctccaaatggatactattatgattaatctattctgagttccttaaatgctattgtaacaatgtcaggggccaagttcaagtctaaagtacgtgtatgatgatcatagctgctataatactcataatgctgaagacatagtaacaacaatttataataggagagcagttttgtgcagcaaaatagttccgtggagcagaattagatcatgaaaatgttgcatggtgggcatttagtcgtgaaagtataaatctgtacctaatgattgatgtgaatcaggtttcaaacctattagatgtgccatttaaccaggcaacatttgcccattatttttttgcatgaaaagtaattaccgtatgtttaatagttactgaattgtgactggcaggtgtgccccaccataataataatgatgacaataataatatcttcaacttcaactcactctccacaagtcagggcaaagagagaataaacaatgattatttggcgtgtttgaataatataaaagccagtctaggtaatttaaggcaaagatcactttcaaaagccagatttatatatttttccctcctccattcaaataattgtctcagagtcccatttcaacttattttaatagttacttcctgcatatctgtgatgggttctcaaaaactttcaaaaccactttcacatattccgttacttagcccttaacaacagtgtcgaatagggtaggagagaaacattgttccctgtttttcatttagaaagccgagattcagagaggttaaatgactgtttctactccacaaaaagaaagaaatcagttgaattttctctgataaacctgccaacgttagtgatacgaaagtgaccacaccgatagagtggtgtcactgtcaatattattctgttggcaaacatattgtatctggaagtcaagggcaagaaaagaaagttagaaattgctgagataagggctgtgctaccgaaaaaacactgaaagggtgccccagctagggtctcaaacctatacctctccccttcagcctggtacttcaatactgagtagattatggtgcccattttgagggaaggctagtgttatctcattcagattaagttttgtgttggtgtgacacagatgggtttatataattaatgtcatgtcctagagggctgtgaacattcctacacttgaggcagtgttcaaaatctattactgtttttttttaattaaaaaagaatttgttttctttttcccctagatggaacttaaactcattgtatatgattgaagaggaacaaggagaaggagaaggagagaaacaacatacaataaagttgtccaccaattgtcccaggaaaatttgtttctcacataggggtcatcacaactgctgcattgcagtcagctggaagtataatcttccatgaatctgaagatgtgatgaaagatagtaggcacaggcaaagcctagctttaagaaaaacataaaatgaggactttgagaccctagggcctctttccttcttcttccccttgataggcaaaggcttttttccaaatcatctttgtaagaagtcccagacccacaatgaactattgaaataccatgatccagtaatgtcatcttcttctgctattaatatggtaatcattttaggtgatagatttcaccttcaacagttcttgaagaacattcagacagttcaccctgaaatgggtgaaaaaaaatcaggtacctcctatttcataaggatgtgagccaggatgaagcagtatgttatcaggcttggcatttcgcaagctgagtagagtccatgtgatcaccaggtataatgttatgctggagttgggtttcatctcttgcttgggtttggaatgtaaacaatcttgaaattgtatttggagagaaggaaaccctgggaaatgtttatttttaaaaaacatggattttttacaaaagcaaatacatgttctaatttacatcagggagcagatacctctttacttttttgagatttttctgagacattaaccttaagttatcacttgtgtgtatcaggagaaaagttgggagagtgggagagatgggtaaggaaacatttttaaatgtacttaaatctcccatgatttatttcaagctgtaaagcatttctaaaactcgagtttgttaattatcccaaggaaaaagaagagaggaaaatagtcaatctgatagactggtgacattccatgtagcctgatactaagttgtgacaaaatatctaacattcggccattgtttttgatatttgtactttttcttgtaaactatttgctctgggacaaaaagtcattggttttgaacttgatttgggcaactaaatgatatacttaaccacctgctttagcccgaccatgactttttaatgacttccattttatttggttttggaaattgatttgccctttaaaaataatatcagcatttaaagtaattttgcttgttttttgtttgtgtagtagctaaatatgctaagagaatgacttcaaatatgcagcctttatgaagatgtgaaaattgctgtgctctagctacaaatggcaattccgataacaagagcttgaatgtggccttgaggcaagggaaaaacagaaaaagtccactgaaagtcaactttgtccccttaatttgcaggcactgtggggagcagggaatactccatgggcacaggcatcctcccgagccatattggttgtagtgttgtctattatatctgcacagttcctcctttgattctttctatgaatcatgtgttagcaacccaagtagctgccattagctccagccatatgggtgaaggtaggggtagaggttgcagagcttaaacataggtatccagaaatcattggctcttcccatttcctgactgattctccaactatcaatctgcttgtaagcacattcacaccactcagtgcccctggtacataaaacaagagcagtgactgaaataagctctcaaactagcaaactgaacaagctatacaagacttcttggatattgaaaatactaaacattctcatagctatagaattaattatttggaagatattggcaagtaccttttcatgtctacagtgtccatctattaaatgggaactactactctgaaagtagcagtaagttttattaggggaagggggagaatcatcacaatcatctaaaactgttttgtttaatgttacctgccaagatatgtgtctaagaggctgctgtggctcccaccagccctgacctctgcacatcactgaacctgtatcctactgttaatgatacatatgtcatatttacaaatgcctcatgtgtctcagggtggtaaaaatgtttctattcaagaatggcaactaaaaacacccataggtccatcatattggattaaccacttatatccagctacctgaaactactggcactactcagaaaataaattttcttttaccatcttgcccacttaccgttctcagaaagtcctgcctttcctttcccttctttatccaattaacccaacttttagctcttacatcaaatcttctggaaagccttctagacatttctctcccttcctctctgccattatttctttttcaggataggttagatattatactgggcgctctcatagcttcatgggcatacccatgtcaaagtagccagcaatcgctattctaagaaacttgtctgaatttgtaattggattgtaaatatcttgagtgcaagatcttcaacttgtatagttgtatttccaattttcaacatatgttgagtgaatgtattctaaatataatattaagcatggcctatacctggtaatataaacatggaaatagaatgattatttaatttgtcatgtctgtgaaggacccttgatggtatctagtcttaaccctcaacttacagttgaggaagctgaggaccatagtgtattcattcattttttgtttattaattcatgaattcattcatgcaacacattgcattgagcatccatgtgtgcttggcactgagctagccactgaccaggtaatgctaagtagagcagaacaaaagacatggtccttccctcatagagcttacctcttagtgcagtagagacacagtaatccaatcatcacacaagacatttatactcaccaactgtgctaactggggactatggcagccaactgatgtgaagatttggcttaatggcaggagtcaggaagcctttcctccaaggtgtggtgtttgaactgaaatctgaagaaccagcagaagagcacaaggagggaaaggagtttgccaggcccaggccagtgggtttgaagccttgaggcaggggggaatgaggtgcattcaagaaactgaaaggcggaaagtgcaggagcagaagaatgagggactcaagaagaaagaggcagtacaaaataagaatgaaagatggtcaggggccagttctgtaggacctgtagccatttaaaaatgtttagttattaacttagaacagtgagagcactgaaatgtgtgagggtcagaagaactgggaggtggcctgataacacatgcattttgaagaatctctgctgcagtgtagagagcagattggtggacaattgatggactgagcagataggtgagaggtagccctactgggaagaatatgctgaagtgtgtgcaagagattttggcagcctggagagtagagagcaccactgacctctctgttttttctaactttctcaaaaatgctacgttcacctacatcttatcaaagaaggcctttatttacctatacttctagcatgctttgctttagattttcccatttctcaggtaagggcacagaggctaacgaacgctcctttcctggggccaaagcgttttcagtttgggcatctcagtaacttttggcaccactgctggctttaaggagcctgttatgtagtctatggtggatctgaataccaggcagacagatgacatttttataaatagtgtgaggaaaccccagaagtaatgtgaatggatgagagttcaagaccactgctgacctggaaagccaatgactgaggcaccagaggaagtaggctctcagagggaagacagaacaccccctttccagctcattgagagtgaagcaggtgcttttctgaagcaggtgatattctgaagatccacctcctcagaacaagtgttctgaagtttctctgaaatgcagagaatctaccatatgatatggttttgctgtgttcccacccaagtctcatcttgaattgtacttcccataatctccatgtgtcatgggagagaccttgtaggaggtaatttcatcatggggggcagttacctccatgctgttcttgtgatagtgagtgagttatcatgacatctgatggttttttataacagggttttcctcctttgctcggcacttcttcctgccgccatgtgaagaaagatgtgtttgctcccccttctgccacaattgtaagtttcctgaggcctctctagccctgtggaactgtgagtcaattaaacctctttccattataaattacccagtctcaggtatttcttcatagtagcatgagagcagactaatacaccatctgtaagaaacttggaaaaatgatttgtttagagttccatctgagcagtcatattattagtaagatatatatgtcgggaaaagaaatttacttcttatgactttttacattttgagatcttattgtttgatgctccacgttgagggagccatatttctccacctggtcaccaggctcattaggagggacagatgtggcctcacatttcatgtgcggttcttgtctcagcccttctttttctcaaagattcctgccttttgtctacttttctcaaagtgccatcttccttctctcaggctcttttgggattacccaaccaccattgtaggcaactctagttctataggcaactctagttctataggtaactctagttcagtatcatgactttcatggtttctataaaaattgccatcccacagccttcttcacatctgtgacaggcagttgagaggggactgaggaaaagtattgcccatacatggaatttgtggagactcaatcaatgttacttggattgagtaataaaggaagttatttgtctaagtttgggcagcaagagaatggcagggacagaaccaaaagcagtttttaaacgataatctttttttatttttttactattaaatacagcttgggggcaaagaagagggatacaatttgttgactttcattgctacatttttggacaaggaaagagaaacagagactcaggactgtttagaagtccaaatgctatttatttccccatactacaatggctgttgaaaattctcctataatatgctacaaatacaagtgtattagagagtttattgtgtatatttttgaacatagtgtaatttcttgtatgatgttaatacagttcttgttcttattctctgtaagagcttgtgttgctgttatctctagataggagcaaacttcataaaatgtagaattccctctgcatgcatagggaagtagcttttaaaatattagcctattccattgtttagttataaagtaaaatgattttttaaagtgcaggataagtgaatttttatgtttcatttttagttattgaattgtctaggtaatgcattttaggagggcactgttcctcccagaacttaggaaagcagtcattcaatcactcagtaatttttagggatttttaaaatagatataacaattttaggatgtcaagttttagatgtctagttttaacttgtttggttgagctgacatttaagttcagtcccaatgtgatgtgaatggacctagccttttacctcttctttttttcctcttcattggaaaccagtacagagaacayggtcacttaataagaaagatgtttcctgctttgtttccttttattcaactcagaactgcctgggggaaaagattgcttcctttctgaatgtggtaagccacaaaatggaaaatgtgcacacgagctctttcctattaaccttggggaaaggtgacagaaatgtgtgaacaatgctgttagctgtttaaatgttcttttattattattaatttggtttaagggttttgcctaacaagtaactcccttgatttgtatgtttcagagttgtttaatttttctccaaaataacaatttgtccttttgaaattctttgttagatttatgtcattccagtttcaatcttggtgatgattcttctatctgtcatgagtggtttaatctgcatgtttataattatagcatataaagccacataattcaaggtgggtcttggtatataattcctttgtactttttgggaaaataaggctgtaatggaagtaataaagatacctgagttgggaatgtttaggtatcaccaaatattagctgttcagaaaaatatccatgataaattagaaactgaaatcagcacatttttctggtttcggttcttttggggaaacactgttattttttaattcctggcttaagaattgtatttgattatgcgaagacaaatccaaaattttaaattctaatccaagaccttagataaattagggaattagggaatctgtgtatgtattttataaccatatcaccatatattgacatacctatgtcactgaaggtatattgtaaaagataatttggccaactgtattggaccaactgctcttgaactctctaagtacaattggtttaagatattgcctgaaatgactattttgcttatggtgtcattctttcatggtcaagatgacagttctctaggaatgttatttcatttctagaatgtcagccaaacagctttttatgatcctgagcagttatactctwmcatcccaaacacacacacacacacatacatcttacacacacacacacacacacacacacacacacacacacacacacacaaataagccctgagaattttcagagaaattcatggtggaagatctgagattagaacccaggaactcctaagattccttggttttgtatcaaaggtcaataaagagacatgaagtcaatgaagtcaacaactgagggaaacatccctgaggaaatgcataatggaagtgctggtgtaactacctcaaataaatatttctactgaaactgatcagtcatccatttgatcaggtaaggcaggcaagcccacctctgattgcgtagtaattcactgatcattatcctgatttcagtggatctatgccatactcaagacctacatttgtcagtgacctgattgtcttattgccctacacagacatataatcagtccagcctgtgtgaaactccttgtgacccttatcatcatacttaagctgttttggtctttcaaatgtattcgctcttctttaccattttgaagccatcactctttcaccactgccagctagtcttagtaatctttcaccgtgcactgtctgttgcctcactgaatcctcacagtcattctatggcataggtaatatgattgtcattgacattatgttcataagggatccaaggttcagagggattgtattgttcagggttgcacagctaatttctagtaaagccaggaatcaacttgcgtctatatgattccatggtctatgcacttagctgtgatgtatgcgttctatctcaagtgatcacctctaaaatcaggatcagttcacagatatttgtgagtctctcaagagaactagggaaacttctgtaaagttagctaatggctttttaatgttatgtggtaattgtggtgaagcaattgtcaattccagttaaattagcttaaaatgataagagcaaacacatatctttgatgataaggctgggatagaggttaatgtctcatcaattttgggtctctcttagatgtttgaccttatcctaacaacttaagctttaggtaaagtctgcatttggtactctaatctcttcctatcagacacaggtgctcttctctgcccaactgcaattcagtccaagacatgccttctccagttagtctctggagaatgttgttcctacttagactcactgcatagatcttaacttgtactcctgctggtggtgtgcatatatgagctgtcacttgaccatgcagccacacctggagacccatttctaggttcagagtcatctctgatgcagcctgtaatttccccactagcatgccactctgtaggaatgaaccagacattgccacatcattctatgtagcattttcttaaaattagagcttcactataaacaatctttggtcaaggaaaggctttgttatctactccatggtctctttgagaaaaaaggcctggtcccattaagctcttgcctcgtttttgcctttcagggattattcgtgctctgtgttagatgtgaacttttggttaggtacataggaaatatctacctaagacacttgtgatttccaccaagtttgaaacagcaatctaaaagctaactcattcattaaatgatggaattgttaagttggtataaagtgatggtacaaaagcccatcagggcaggtttgaaatctaaatgcctttcagtatgcattgaacatgcgcatccatgagaaaatagtatgataaagaaagcagggtgtgaccttattggattcatatttccttatagaacctccaaattaagacaaatttccagacatttctaaaagcagcaatacaatcaagaaaacaaaacaatgagattcagtatgtagctactgcaaatttgtcagaaaataagtgggaaaataacaagatcctaggaaatctgttgtatggagctgaggaaaaggaatgagtttaggtttttctttaagttattgaagaaggcatgggattatcttctggttgctagtcttcccttagtttcaatgggaaacttatcagacacacttatcttgcagaagcaagataagaggacaaaagaatttggaagatcatggtggaattaaaaaaaaaggaatgtagtcagatggtaaatttagtctaattatatttagagatgggttaacataatcagaaggtaaggaacccaattatgagataggtgtgataacatagatggcttaataaaatacaaaatagaaagatataaatagaatgcttttatataaattctggaggagtttaaaaatgagtgagtgttcaagataacttagaaggaaagatattaatataaacttgaggtatgttggtcttgaagaaaaatgaaaaagctcattttgtgaaatgagtggaagaataccagctctttttcagattttcaccattttattaatattttttgattatagaattttaattatgtaggaaggaatttattaaaaagtaaacacaaaataaaaccaatcatatagttttggccaaattgttgcttttcttttacttcatttcctaaagggcatttctcagagtcacttgaaagtaaaacttgagagggttttatttttttgatttatttatttattttttttagtggctgtttgttgaaaaaccttgttgtaggctgctaggcattcttttactaagaatttcgaatgcacctcatgtgcaaaagactgcttaagtgtgtcactgcagaaactagcaggatttcaaaatcaaactcatcagttttctgtgataggatgatggtttgggagatactcaagaaaggagtacgtgttagtagctgaagatttttctgtcttcttccttgtgttgtcagatccacacttttattttccttttttttttttttgagacggagtctcactctgtcaccaggctccctgcaatttctacctcctgggttcaagtgagtctcctgcctcagcctcccgagtagctgggattacaggtacgtgccaccatgcccagccaatttttgtgtttttagtagagatggggtttcaccctgatggccaggatggtgttgatctcctgacctcgtgatccacccgccttggcctcccaaagtgctgggattacaggtgtgagctactgtgcccgtccttgttttccttttgtcaagaaagccagacattctgtgacacggtaaatgaaaaagggcttggacccaaccccagctctgttgcttgcttgttgcgttgccataagagaccctcaagaagaayctcacaaaatccactgccctcccttagtctcgctttcccactaaatcgctccatgcaaggggagccatttatattgcattaaacttttctcggtgttctctaattccaggggttcttactgcctgagagggtcactccaccatgtgggtaagcggggtgtccagagtctgcccataggccatcagcatcagtttttcaaatcctgggactttcactaaaaaactgtggttcttattttaaaaacaaaacaaaccaaaaaaactgcaaggaagcaaactccacaaaacccatcaaaaccccaaaattttcttaaccttaataacttgttctttttccatgcatatctaattcctccttttaaaaaatacctaaaaaattgaaattggtttaccacatattcctgttggcccacgacacataatgattaatattttttcctttataaaaaattgattgcttttactgtgacaactttgacaaagtctttcaaagagggagagaaatgtgaattcaaaaggataatgtggcttttattttttttactttgatcctgttttgtgaagcattacctaggttagtattgcctcatgttaatcagtgaccataaaggccattaggatgccttgatagatgcccttggtctcccttgactttgattgaagcatcttaaaggcctgtatgcatgtggcacaacatctaacattgtaattgctcactcagtagctctgagcacttactcttcaataaattcttagatgccgtggggatggcgaatgaactttttaattacatgtctgttgttttctatcaccaggaactaaattaatgggaaattagttcacaaggtttattatgcattttccctctttaagaggggactctttctgacagcccttccacttttatccttttaccatttttttttattggcctcagtactgaaattccttctttcttgttccaactacatcagaaacattcaatagacttagcagcctatgaaagtctgacaattacttcctcacggcagccttgtttcaagagtaggtccagaataaataaaagtttttcattttcctggtggcatctgttagttttcaacattgcccagagaaagagttactgtggaatacaaaaaaatgagctatttttttcttccttttggggagaaacagacatatagaaaaccatgagtgcttccttcataaatcatattttatgtgcaaccagtaagagagagagatgatgatggttgtggaaaagtcatagtggataacctcaatttattcagtcttctgagataatgtaagagtaaagcatggaaacaggaatacagagttcatcataattatagatcatccattcaaaacattttgaaaacagtgctatgtaaacttgggatgacaaataatgaagcatagttaacacttctcattggttgtgaattttcaaatacatccaagtatttaatcatggccattcatcattctgtaaatcaaaactaggtctttgaattctctccctttcctattctcagattaaggcatatttggtttcatataaaatcttatgcataattttgaatttcttgggccaatcaaataatggtacataatttaatttaaaaaacttttcagaaggagaaaactcatgtttcacatacttcttattaatcctaaggcctagcaaagggtacatacagctgtagttcacctcaattatacactgtaaatatttagattagagacacgaaataagttttgggagttgcaagaatagaatcagatgtaggaggtattcttgtagaatagagatggagatgggatttaaaattttttatttcactgctagagcaataaaatcagtattaaaaacaaggagaggctgggcacgatggctcatgcctgtaattgtagcactttgggaggctgatgtgggtggatcacgaggtcaggagttcgagaccagcctaaccaacatggtgaaaccccgtctctactaaaaatacaaaaattagccgggcgtggtggcgtgcgcctataatcccagcaacttgtgaggctgaggcaggagaatcgcttgaacctgggaggcggagattgcagtgagctgagatcagaccactgcactccagtctgggtgacacagcgagactccgtctgaaaaacaaaacaaaacaaaacaaaacaaggaggggcatgggcttggattttcataggaagagaggctgagaagaacaagaatgctgacatttgttttgtgaaatgggtctgaatgcctataaaagactagcaggtactcagacatgcctgtcaccacttggcagcaaagcaaggaaataggacagtattacatttgtgaagttgttgatcagaaaactagtgtgcagaggaatttgtgtgttttaaaatattcccaaagtggcagaatattactgacatttgaaacaatagcacagtctacctatgttaaaatggtatttccatttttaaattatattttttcaataaaagtcttgctctcttcttaagttacagatttttactttttcattttgcttgttcctgtgctccttgatccatcaatgaaaatgtgattttctgttggagtcttcgataaatatgtaaggctattttcattgcatcagaaagctgaaagggaccttggctgatcatttgtgtaattgaatcgtgtctgcgtttagggcacaattttcattttatgaaagaaacacaagatttcccatgatgttttgcatgtctacaaattcaggcgaatgagtctttcctcgggctcagtgagatcagtggggtcatgctagtgaattaactggcatgatatttgcttaacaaaagcatgccataaataagagacttaatagtcagttggcaagttgcttcatgctaatgctgtttttaaaatttaaagtaatggatgaaataaagttttatatacatgtctggatttttgaaaaataagaagatttgaggcatagtgtattatagcagaaatgtcttttaatttatttttagttgttttgggtacatggtaggtgtatatagccaaaaaccacaattacttttgcatcaacctaatatttacagggtacatgagatgtgttaatacaggcatgcaatgcattataatcacatcatggagaatgaggtctccatcccttcaaacatttttgctttgtattacaaacaattcaattatacatttttagttttttaaaaatacaattaaattattattgactatagtcacccagttgtgttatcaaatagtaggtcttatttgttctttatagctatttttttgtacccattgatcatccccaccttcccccaccccaaccctcccactatccttcccagcctctggtaactgtccttctatttccatgtcttttaaagtgtctccctcatttctgtgtacatgtgactcactggggaataaacagggaaatcctttgtgatgaatcagatgtcattctgagacacagagcttcttatacttttctttaaaatcatatttgcccttctagatcagtatcaagcaaataacaaccaagaatcaacatgcataaaaatgacaaggttatcccagagttctagttgtcattttcatagttgccagcacccttttccaggaaaacaaagagagtggccatctaagtgatgccgttgaggaagctgcctttcccctaatttctggagagcctagtgtagagggagaactcctgcctctgggaatatagcttttagggcatccctttatccattctccaccattccttcagtgaaggaaattataaaagcaaaactgggacccaaggcatgctttgagtctctttgcctcagcccgggcaactgtattctccgaattgagttcattaatattgtcttcttaggagaaatattatctttctccagactgggcagggagtctggcttgagaggcaacaataaagaaagaatatgtcttcctctataaagaaaggccactttataatgaatttcctttagatcacgaacagcactgtaagacccagactgtcaacttgtgcttttgaggttaggagctgagaaaactcttcttgattaataattgagacctaaacatggcaaaaaacaggtctgcctcagcacggagatcatgcatcgaggtggcgggcgatgccttcagtgggttctcttttcttcctgtctcctctgcgattatgtggcaagtttagagtcaactacaggaggagtttcagacaagaagcacagtttgatagaaactaatttctggattgtgattgtgtgagacctcctgggtgttcctgagactttcggaggatgattcttggccttgctttgtttttgttcttttcttctttaggttttcatctgaaggcaagtaactcatgtccctacaaggaaattcccctgaggaattagagataagcatgcatttctcaataaaacattttcagaaaaaaagttgctgtgtttccgggagaagcagatggctgctattgagagacacctaggtttgtgttctgggaatctgtctcctactcatgatagcagggggcagattcagatctgcaggaggtagaaataggcatcagatcactctgtcctaaaaaacaaacaaacaaacaaacaaacaaacaaacaaacaattggaagaaatgaattgatcacagaagcatctagagctaggaccaattaaaagtcagttagtttatatgacctatttgaagatttctcaacaatcttgacctattgcttaagagcacaacatttgtagtaaaatgagcctaagttaggatatgacttaagatcactgaccagctgtctaagcttgttagggttacccaatattgtgaaacttcagtttccccatttaaaaatatggaggcaataatagcaattacctaactggttattgcaagcattaaaggaggtcatcaatttctgtttgaggttggaaaatccttcaaaagctttctattcatttgagtaacaagcaaaacattctgatttaatatctgtatgtgcttcagtgtctttgattatcacatttagaatattcaatattttacttgtaatagtgaataaaaagtttgctggttgagagagtgaataaatgggtgaatggaagagtaaataatgactcttgtaacactattagttatggagtggatacacactagaccagtggggctgagaaaatttaaaaaatattcaagcagtagaaatttttacttaataaatattgcttgggaggctgaattaatgataaaaataaatgttttgcatttgacattatctacccaataattcacttctctctgcattctctcactctcttaaagaagggtaccacattgatgatgctaaatgattcttgtagaaccagccagaggtggaaaagaaagtagttctgacacttggttaaaaaatatacatatacataaataaagtcaaactccactgccatctctactcaaagtgtgtgcatactttcttaagtacacgctgagatgactcattttacacttctttttttacatatttaccctgttttaatgggttggggaatggcaagagcaaaggaaagaatagctgattaccattcaagacacacatccaaatcacataaagaaatctttagatctgagaataattgtgaaaagaataccaaattccagtgtagctttaaaaagtgcaccgttatctttaattacctgcttgatagaagaatatttattttggaataagaaggaataatttcaaagttgatggccttgttataaatataagcaaattaacttttttagaaagccatttcgaactccgaagacaccagcaacatttttattgattaattctttagtgttataacaagcaagttgtttttatgccgtatttatgagctggtatataatcacacatctcaggggtggagaggaccttaagaatcatccacttcaacagcttatttgaaatgtgtttgtttttatgttctgtatatattctgttcttttggttatctctctctctctgtctctgtgtctctctctccatgtatgtatgtgtgtgtgtgtgtatgaaatagataatatatataaattatcataaaagtatatttacatatatattttaatgcccactctattggacttgtaagaaaatcttacttctataaagtactctagaggcatatacttgtagcttattttgtgacatatgtttggtcatacatctaataacaaatctttgatcaggagcataattccaattagagcagtggttcttgacagcggcagtgttccatcctaggtattttatacatgtatcagaattttattttatcatctcaatgactagtaaaaggcaaggttgctgggtgccctgtgatgcatgtgacaatctttctcaaaaggaatcctcctgcttctcctaaaatatttgaatgacccactggattttgatgtaggttagagactgtttataatcatcggagcctagattttattttacttaaatcgcagagtactgtttttgctattttaatatgctgtaagttttcccagaaaacaacttgtataaattgacaaaacttattttgttcagaatttttccaggagatgctcaatatttcagaaaacgacctatctaaagrcaatagtgtttgtggcatttaagatagaaataaagtacaaaccgtcagtctgcatgcaaactgtagttactgtattctcacgattctaattatgggtgcaggcacccaggactttgctatgttttcaaatatagtttttttctattgctatatatggaaattcttataattttattctgaattaataaccttacatcttttttatgatatacttgggacattatattgatttttaaattttgtatacagataggttgtattatctataaatttcaaatcatagatgatgtaacttattatgtctatgataatgaaagaggcattaaattatgtacgagtgcaataaggagttgcgtttgatagggccaaaaagccctgaaataaaaaagcagtatactcaggggaatttgctacatcttctagtacaagtagaattatggggcaatatactatttatcgattgttatatagtaatatcgccacaaactgagtggcacacatttatcatcttagagtttctgtggttcaggagtctgagtatggtttagctgcaacatctgcaaggctacaatcaagatggtggccagagctgcagtctaatttgtaagattggctgggaaaggatctatttcatgagtcatgcagttcatgtaggaatcgaggtccttgaggcctgttggactacagacctcaacttgttgctgtctgctggataaaggcttcgcttacttcctcaccgtgcagctctcttcagtatggccacttacttcattgaagccacaaagggagaaagtctgaaatcaagacagaacatataatcttatgtaatgtcatcatgaaagtggcatcctgttggcggagcttgcagtgagccgagatcgcgctactgcactccagcctgggcgacagagcaagactccatctcaagaaaaaaaaaacaaacaaacaaaaaaaggaagtggcatcccattatctttgctgtattccattggtgacaagtaaggtatagattccacatgtactcaaggggcacgyattacacaagggatgaccactcacctgcaaggataattgaggaacattttcgattctgttcaacacagccaatttcctatagcagtgttaggtggaggggatgagttattgggatcagaaggtagctagtgtgttctgtagtctttattccaatgaaagataactttacccattaatgtgaagtcaattgtactcagagaagagggaaaactagattactagaatgtaatctgtttaagtcttgtaagactacaaagtccttactaatttgatgtgcatttctctgatgagcatttctgtagcactggagtccagtgatgcagggatgggttatccacattttctgccactcaagatctttccatccaggtgatccagctagttctcaggcccatcaaactttgatccagggtcagatctggaagaggtagagagcatttttttaattccttatttaaaaaatgtgatttttgtgggtcatgtgaaggtttgttataaagataaacacgtcatgggggtttgttgtacatattattacatcattgaggtattaagctcagtacctggtagttatcttttctgctccgcttccctcctcctaccstccaccctcaagtagacctgagtgtctgttgtttccttctttgtgttcctaagttcttatcatttacttccctcttataagtaagaacatgcagtatttggttttctgtttctgcattagtttgctaaggatgatggcctccagctccatccatattcccacaaaatatatgattgtgttcttttttatggatgcatactattccatggtgtatatgtaccacatgttctttatccagtctattattgatgggcatttaggttgattccatatctttgctattgtgaacaatgctgcaatgaacattggcatgtatgtgtcttttccggtgaggttgcagagaaaagagaacccttacacactattggtgggagtgtaaattagttcaaccattgtgggaagcagtatggcgattcctcaaagggctaaaagcagaactaccgtttgacccagcaatcccattactgagagcatttaagagtcaaatgtattcatgacataaatgtgtattgaaaatctgatatgttttagtgattgttttatagggagggggcagagactctgcttttatgaagcttacagtgagtgccagccaccattttagcttttgggggccttctctaagaagggtggagtagttaatgtagacaaacatgggttttggmagcatacgaccatgaattaacattatatttccgcttaccagccgtgtgattttagcttacgaaagctactctctggttgtttatttcttcaagtgaagaaatgggtctaatagtacctatcacacaagattttctgtgaagattttgtgagatcctrtatattaagcacccagtgcataggtgttctcaatgttaaatcccctctccatgtctgaaccttcaataaaacagactattacaaattacatatgaagactttgatgtttaacgtcatccacacaaagttaggcaaaagtcatatataacaaatatttaagtaatcacctggaacaagatctctttagttattttttaaatatgagatctcacaattattctcagcatttcctgttcattgttttgctatgggtagcatgtcctgattactcagttatacaaaatatttgaatggcttaaaggagtatttgtgtttgacagcataaataatattgtttttgaaaatgtatgaatacagatagaaatcaatggactggagtatatgcatttgtctatcttggattgatctagtgtattgagtcacaaaatttagttgatagaagggatagagtatgagaaacagagtcccacaactttgcatcaacttagaaaattattcttttatttaacattcattcattcattcatttattcaacatttttaagtttccgttccaggatcttgagtacagacatatgtggttttattgcactttgctttatcatgctttgcagatattgtgttttttacaaattgaagatttttgacaatcctatgtcaagcaagtctattggtgccattgttccaacagaatgtgctcactttttgtcacattttggtaattctgaaatatttcaaaagttattattaatctgttatggtgatctgtggtctttgatgttaatattgtaattgtttgggagcacaacaaaccatgcccatgtaggttgcaaacttagttggtaaatgttgtgtgtaatagttgctacaccaaccagctgttccccaatcactctccctctccttaggcctccctattccttgagacaaaataatactgaaattaggcaaattcacaaccctataatggcttctaactgttcaagtgtaaggaagagtcacacatctttcactttaaaccaaaacctagaaaggattgagcttaataaagaaggcatgtcaaaagctgagataggccaatagctaggcctcttgttccagttagccaagttgtgaatgcaaaggaaaagtccttgaagaaaactagaactactttagcgaatacacaaatgataagatagtgtgacattctaattgctgatatggagaaagttttagtagtctggataggagatcagccacaacattctcttaagccaaagctaactctcttcaattctatgaaagcttagaggtgaggaagctgcagaagaaaagttggaacctggcagaggttggttcatgaggtttaaggaaagaagccatcctcatagcataaaagtgcaaggtggtgcagcaaatactgatgtagaagctgcagcaagttatccagaagatctagctaagattattgatgaaggtggctacactaaacaagagattttcagtgttgacaaaagggttttcttttggaagaagatgccatcttggctttgaatagctggagagaataaggaaatgactgacttcaagggacaggctatcttgttaggggctaatgcagcaggtgaccttaagtcgaagcccatgctcatttaccattctgaaaatcttagggcccttaagaattatattaaatctatcctgcctgtgctttataaatagaacaactaagcctggatgccagcacatctgtttatagcatgatttactgaagattttaagtccactgttgagacttactgctcaaaaactaaaaaaaaaaaaaaaaaaaaaaaaaatactcttttaaaaatattactgctcattgacaatacacctggtcactcaagagctctgatggagatgtacaagaaggtgaacgttgttttcatgcctactaacacaacatccattctgtagctcctggaccaaggagcaatttcaacgtctaagtcttgttattgaagaaacacattttttaaggtgatagctgccatagatagtgattcctctggtgtatgtggacaaagttcattgaaaagcttctggagaggattcatcattgtagatgccgttaagaacactcatgattcaagggaggaggtcaaaatattaacatttacaggagttttgaagaagttgattccggtcctcacagatgactttgaggagttcaagacttcagtggagaaagtatttgcaggtgtgatggaaatagcaagaaaattagaattagatgtgatgcctgtggatgtgactggattgttgcaatctcatgctaaaacttgaatgattgaggaattgtttcttacagatgagcaaaataagttttcttgagatggaatctgctcctgatgaagatcctgtgaacattattgaaatgacaacaaaggatttagaacattacataaactgggtagataaagcagcaacagggtttgaaaggattgcctccaatttctcaagaaattttattgtgggtagcatgctatcaaagagcattatatgccacagagaaatattttataaaaggaagagttaaagcagcaaatttcattgttgtctttaaaaaaacaattagcacagccatctcagacttcagcaaccaccatcctgatcagtcagcagccatcaacatcaagggaagaccctccaccagcaaaaagattatgactttctgaagattcagatgatcattagcatttttagcaataatgtatttacaaattaaggtatgtacatttttcagatatgttattgcacacttaatagactacagtatagtacaacttttgtatgcactgggaaaccaaaaaattyaggtgacttgctttattatgatgttcactttattattcagttcactagaactgaacctgtaatatccctaaggtatgcctatgcttgaaaaatgttatcagtaagatgtgtaatgtgtgacaaatccagataatacattacttttggagaagctgagctgtttcaaaagtgttccttttatttgaagaagaagcagagtagcccaatcaagtaattttatttattttgaacttacacaataatttacgcttttgtttttcagcaagtagtaagggaggtgggttaatctgaaatgaaatgttcttagatcctgytgttcagttggttggagggcattaaagatagttattacttaagatctctgttgttttgaaattcccattttcctctgacctaaattctatgatgtaaaagaatcccagccaccacagatagactgtttttccttatttaaatgctttaaaatttagttttgacggaatggtctcttaatagaattcttgtgattctgtaacatcttagcatctttggttggcacttagaatattctcccacaggcatatttcatttgcctgtatgcttgtattcctcattagcttatttcctctggagagtgagactctgtttctgcatgtaacagttgatcagtaaatgttttgattattactatttagatcctgaacatgaacgggctcctattcctttcctattgctgcccccaatgaatttttacattcaaaaagtaatgacgtgttatcttggtttttgtttctgggaaatattaggaatgctttttggcaaatttcaagggaatcctatttggcattagaaattatttattttgaggcctcgtgtaaaataagcttcaggattttgaataactttgggccctggagagagtaatacctaatgaaaactgcaactcaaagaaataatgaaaggcctctttaggaatcaaggtggtagctctagctcttgaagtcttctaatcaaagagtcaacaaccatttttgatctctgatcgccaaagcaggcctcagaggggtcaactggccatgcagcctgatctcagagtaatggctcctcctatttcaagattcaactcaagcatcaattcctgtaagaaaccttgacagaactgccttttctcccacctccaagtcaatgtgaccactccctttttgccttcactttctctcctgacttgcatttgatcagctaaatttatgtaaaaaaatgaagcctacaaccctaagctgatctgaaacacacagcaaatggaggtagccacatatatatttgataatttcccagtttatagcataacagttaaatcattgtaatttcttatggaatgtatggatcaaacattacatttattctgtattgtgtgcatttggagtaatccatttgacatttttttttacattgtgctagaaaagttaatgaggccactgaagagaaccaaaagtaggaattagaactgaagatacagcaagaattgctaaaagaaaggaaatactgtataaaagagaaaaaagacttttatggagtgattttagagtaactatggctttgtaaaaatgcacatcagtttatcagttttataagccaatgcttggtgggtatggagtttttcagtgatccagtttcaagtaaataagcaacgaataagaagaaattgtgtttctttctagaatgtgttgtcaaccactgaatttaatgctaccaatagatgcagactcatgaagtgcagtatgatttcgataaggcctaagcaattatcaaatcagaaatggatctctcatgctataaaattgtacatttaagcaaataattttaagataattggctttcaaactatttttggatgtatcagaagggatggttgtggaaataacagcacagtaaatgaatagttactggaggacaggaaagcagaaaaaaaatctgaagtgtaaggagatacagtcaagctgtttataaaatacatttagatacaaaagaggtcactgtgtggaaaacctttagaatcactgttgaaagaaaaaaaaatgtccacttcccaatttcaagttctattgggattgtttgtattataaagagttgactaataaattcctgccaaggattatttccctatccaaacaaaatgtccacaattctttatgagagaagatgatacccatagcttctgcttcccgcagtggcactctcatcacatatattggtaagtatagaggtgccaaggagaagcaggcaacagttttctccatagcatccatagtcatgctgttcagcagataagcctagtacagttagtatgtcctgattttttgctaaatcctgggaaaaatgaaaagagtcttccttatgcagttgtgttttgctgctgagttgtgtttgcagtgtattagaagaaatacatgtaggaagcctgttttcagtacaccactgtattactccatggtcttgaatttctgaggtcttaaaatagggttattaatattacggagaaagtcacactgctgggtaatctgrttgaaatggagacagagcataaaccaatagaggtgtacacatatactaagaattttgactggttaagggaaacaagaaacaaatgtatttgttttcattagtaaatatgattttttctcaggatatgagtaagaattagtgaagagggaacaatattaaattattttccttagtaaggtaggatattaaaaattaatcccttctatttgtcagttttccatgtccagagttaattgaacagttgtgttaacattaatataacattgcttgctggctaccaacaataatagcatggaagaatgttttaaggtatgtcttctggtagaataactatatcctcattattaacagtgtggaaaatgtagaaatgtagaaggaagcaaataatcactcatccagagatgatccatgttaatgttttagtgtatttttttctatatttgtagctttgccaatttcacacagttactttttaatatatacaccggggttaagtctttgtatgattacaaaataaattcttgttcaatttttgagaaaaataaggaaactatgaaaacagtataaagaagagcatgtgtgattcctagaaaacagcaaaaataatttggaactgcttttaatgacaagggtaggcaatcaagtttgctaaaatgaataggataatcagctccagccataaataaattagtatctttttaatgtgtctgttgtgtgtattctgcagctggctcttaagtaatttttaaaggaggcctgatatgtgttcggagggggagcaacatgattagaatatggtagctagcttggaataggcatcatcaatgattcgaatgcatgctctagatcatgcatgctttggaagctacaaagcttctccaaatcttggagaagcaacacagtgagaaacctgtcactaagcttttgaggattcctatctggaagaggactgttaacagtaaactcaggctgcagttgattttctttccatcatcaacatattatctgggtctagtgaattacaaaccctcctcttggcttaacattctctctgatggctttctgcacattggcttcctcttcttgctatcacggtaattactcaggagacataccataggttttcttgggtttagatcagcttaggaaagaaaagaaaacttaatcagtgaacagatttctttggcattttccatgtaatcctgggacccctgcttgttagttttgtcctgtttcctgttacagaaaaggctgaaaatcagcatgcagatgaatgagatagcagatggttttcccgtgatagagaccaacaatttgtgagatagaatagtaacgacaaacatacataagagaaaaggcagaattagagtacagtattttaaaagctttcaggcgctcaataaatgctcactattgttaaagagagagaaaaaaggaagtcctgtataatacatcaataagattttaattttcagttattattatttgagctttatttcccagctctctgacacagatttaggggtggtgtggatattcttagagtggaaattattgaactcttagattaaaggtactcgagttcctagcttgccctgtaactacacatatagagaagatcactctcgtaggtgctagtaagtaggagataaaagttttagggggaaacacagagggatactcagaactgggagcagtcctaaggtggaccttcaaaatgattcatgtcttagaaaatatgatttaagagaagttaggtctatagggtcattttatctgaggaaagatggctgtaaggatctttaatgataggagtcaaatatatgagagattgttgcaaggagaatgttaaccagctattctacaactcgactggggatagaaatagctttaaattacaatatacagaatttagattagataaaggaagtatgctctgaaagtaagagttgttaaaagttagaatatgttttccaagtaggttacaaaattgttttaataaaattatttgtgtttattcaaaaataatgaaaacatatatattacatatataaatattgatatattacatatcaatatataaacctaggatataaacccaatatgtaattgatatgttacatatcaatatatattatacatgtattgatgtcttacatatcaatattatacatgtgttgatatattacatatcaatatattatacatgtgtttattatatgtgtgtgtgtctatgtacaaaaagatagctttttgacctcaacagcattataacttgataattgtcttattttggaactcacgctgaagtagctttcagatactgttctagaaggcttaaattaagtatgttgacaataccccaaactactggatgatatttgtaatgaatttcaccctatatcagtacagaagggtgtcacagttcagcaaaacaaaagagaatacgctttgttaaacctctactttctgaattttaggacagtgaggaaatttaacattttcaatttttttttcttttcttgactgaaaagaaagtcaagccagcaatatgtttctgagagagcagtgatgcatttcacaacactgttaactgtctgcttggctttttgaggcttccagagttcagaattgtcttctcttgaataggtcagtgcatttttttccttcagtttttctccttaagcagcaaaacagaccatttaacttccaaatatttacagcttgcaaacagataaacttcccaaatctgtttttttttatgaaaaggaaaacgatcagccacaataatctataatacgatatatttgaatcaaagttattagatgccctagggtcttttcatggcagattttatatatcaccaccattaataaatctgttatcagaattatgtctttctctctgttgatagttatttttagactaacatattcatacctccttctgatgaaaaacattaaaatttgaataaggcatattagaaaaccctaaagctctgtatttacacaaaggagactcataaatattggtttttcagggtgaagcattgtgtgttattccattttgtaccacagggaaagcctagtcacacatggggcctcattaaaagaggatctaaagaaatatttaatggttgaaatataaggtcttattctgaatatctaccttcactttataataatagaaactgaactgaaaagattcagtaagtgatttagaacatccactcattttaaaagtaatgtctaggcctaggaaagtgacatcatgttccaaatgttacaaatccagcgtttttccttgatgtctttataaatacattgtttacagtttttattctcctccatatatgatgccccttttctaagattatttcgtaggtatatcctttaatgagagaacctcataaataaacttcctgaatttgaaaacgagtgagaggagacttcaagtttgtggactgagctaaacatgtgtctactctcccttcaaacatcccatggaaatggcagtaaagacagaacaaagagaatacatttctgaatatactgaggaacatatactccagagagcagaaacaggaagaggggcctctgctaaagctgaaggagtcttcaggagggaacccagctgggctctgtgttctggttggcagatacagagagtagccaaggtcaaaagcagacaaacagaaagtkaggtgattggccacaggtttggaaatggctcaggtttgctctttccaaccccttgcatgtcactgcacatttacctccagaagtaaagcaggagaactctgcaaagggaaccaacamtctgcatgggagggcattgcctccaagtgtgtgggctggcgaccaagtgcagccctctgccctagttatgggagttggagagggacttactggtttgcatgttccatgcaagagctaaagcaaagcacatctcggagaagtgagccaggaaagtggatcaatccatgccaacaacctatattaattaacctgataattaatatgtatataaagtgaaaaaaaagaaagaaaaaagggaaacagccatgagacaggatttcacaacctctgcactatcaacattttgggcaagatactcttttgttctggagaagtgttctgtacattgcaggatgttaagtagcatgcctggtctctatccaattgatgtcagaagcaagcaacatccatccctggccactgtgaacaaaaatgtctcaatatctagacaaagatattgcagcatactctggaggacaaaaccagcactagctaagaaccattatcctagagaaaatagaaatggtttagagaagagatcttttcaagatatctaccttggtatcctcagacatactgaagaattacagtctctaaaataattttctgatacggaaaatgaagaaatcaaaggacagaaataacccacggaattttaaagtttaattaacaaaattgttgaaaaattcaaggaaaccttccaaaaggaaaagaaagaagaagttataatatgtgaaaaaggggaagagacaaagagaatccgtttaggaagctaagtgtctgtctaataggaattctaaaaccagagggaaaaagcacaataaatgagacaaaataatcatgacatttcctagagttaaagaaaggcacgtcctcagaatgaaaggcccaaataatgttgagaacaatgaattttaaaatacctacatcagacacatgctaatgaaactttagaataccaagacttaagatcctaaagattttgaaaaagaaaaacataaacaaacattctatcataggaatgacaatcacagtcaagttttcaatctgcatcttgaaaatgccagatgataacaggacagtgacctaatgttcggacagaaaacaaacctaataccaaatggaatcaaacaggaaactcagaaatagacacgttaatatgctcaagtgatttttgacagaggtacaaaagtcattcaattgccttttccacaaatggtgctggatgcccaatggcagaaaaaagtaagtcttcacctaagtcttacaccttacacaaaagtcaactgaaaatggatcacagacttaaatataaaatatgtacctataaaaccttttagaaaaaaacaggagagtgtctttcagatctaaggtgagccaaataatgggtcgacttgatactgagatcacaacttataaatggaaatgttgataatttggactttgtaaaattaaaaacctttgccctgcaaaagaccctttaaaaggatggaaagacaagctacagattgggagaaaatrtttacaaaccaaatacttgatctaggactagtaactcaaaagtcaacagtaaaaaattttagtaacaatctattttagaaaatgaacaaaagacacaaagagatatttcaccaaagaggatatacatttggtgaaaaagcacatgaaaagatgttcaaggtcattaaccattaagaaaatgcaaattaaaactacaatgaggtatcactatccaactatcaaaatggctaaaataaaaagattagtgacgagaccaatcgctggcaaagatgcggagaaactggattactcattcattgctgctgggaatgtaaaatagtacagcccatactagraaagagttcaatttcataaattaaacatacaactaccatatgacccagcaattgcattcctaggcttttctcatagagaagtgaaaacttgtgttcacatagaaacctgtacgctaatgttgaatgttcacagcaactttatttgtaatagctgcaaactggaaacatctccagtgtccactaatgggtgcatggttaaacacattgtgatacatccataccatggaatagtattcagcaataaaatagaacaggcatgcaatggaaagttacatgcaacagcctggatgaatttccagagaaatatgctgagtgagaaaggccaatctcaaaaaattacataatgtatgatctaatttttataccactttgaaacmataaaattaaatgaagaacagattagtggttgccaggggttaagtaaagtgggaggaaagtggttgtggctataaaagtgccacatgaggaatgcttgtaatgatggaattgtctgtttcttgactatgagtgtcaatatcctgaatgtgatattgtgagatgttaccatgggggcaactgggtaaagggcaaatggaatttgtcttatttcttacaactgcctatgaatttacactgatctctaatgaaaagtctcatttaaaaatttgatagtgcttgattttatcagttgatcaagctgctcttagttgaaataacaatttcagaaggatcagcataatgaatctaccagtcactgaaaactctcaattatctgtcttgtcttccctttcagtttttgtttcatttctgttttagtaacctcttagaaaaaggtagtattaaaggagacctaggtctcttttaccaatttaggataacttcacaatctccgcagataaattggtatstgtgtacacacacaaaaataggaaattcttgtgagtagtttacaggggaagtgcttaatatataaacaaggcagtgctctggtaaaattacttattgcattgagattaagaacataataaaattattaaaatagcctaccactttcattacagacttaaaatgttcttccttttatctctgggggttkgataatccctgtttattgttcttttattttgctgtatatcacgttggccatttaatcattggctctttagcagggtgggtgtagagagcattaaaaaataataaatgatgcagtttatcatcacctccctgtaaaacacaaggcacgtgaaggatatgagtttcctttaagctaacgtatttacttaatgtgatttcaaacaaactcctacaaaagtttttggttatggcatccattttggaatttgaaaaatatatataattcatctgaaataaatgtataaaacagctaattttctggtaagatataatatgtgggattatcactactacttttcaaaatgtagtctaaagaatattacttaaatgagctttatgctgagtaaagaatatgggggaaaaaaccctaagagtataaaagcccagaaagagcctcttctacgtatgagagtgtatgtatgatatactatattaatatatgtattgtttaatataacctattttgataaataatagtataatagactatattatatactattatataatatagggaggaaagtaccattaaataaaagatactggagcaactggataactatttgaaaaacaataaacttagaccatttgttgcactatacaccaaaataaatttcatatagattttaaggttaagtgggaacaaaaagatatcacacacaaaaaactgtatctgaaagtaaatatgttctccttatagtagagtgaaggaaatcagttaaagcattcaaataaagagaaaaatgtaaagagaaacattagtatatttgctatataaatggtaaacgttttatatgtcaaaaatcatttgtatattaaatatttatattaatctgtcatatgtggtagatgattaatatacctagcatataacatgctcatataaataataaaaaaatcataasagaaaacaagacaaaagccrtatatgtagataattcatcaaatggaaaattataaataagcaaattttgaaggaaaataaaataatatgttctatgattaaagtggtcaatgtcttttaaaggctaatattaatagctgacttgtggtctgtaaagaatagtttatttaacatgtgacttataaaaatatataacacttttggacagcatttttagagataaatattccacactttttgtagcattgattaactttattcacatcttaaatacttataaaaatctgaatactactttatttcaatgttatttaaattggtgtcaagttctggctaatctacctaccgaatagtaagaatattgttatgcagatcattgttattctataaaatgcagtaccattcagtcattcaaaaatacatttccaaaaaatgtttagagaaaatgctaaaattatgctaagtgaaaattcagacaatatttaaaattttaatagtctgacagattctgatatagataaacagaaagaaagaaaggtaatgtaattttcatgtaattgtacccawgtatatggggaaaaaaggcttgaaggcagtatacaacaaaatgttaaggacttgttatttgcatctactatttcaagaattccttctgaatataaccaacagtttatgcacaaagaatttaattgcaatattcttaataacggtgaaagtcaaatattcatcaataggtaagtgtttaaattacattatcaaatactcrgatgatakaattctatgcaggcattataattatgtctttgaagtgtttctgttttaataatatgtaaaagtgcttatgatataatgctaagtaattaaaccatatgaatgtatgttaaaaggctgcatgaaaatatggtaaattgtttgcataggttatcattgagtagtgaaatcataattgctatttctttcttttttctttttttttttttttgagatggagtctcgctctgtcgcccaggctggagtgcagtggtgcgatcttggctcactgcgagctccgcctccygggttcacgccattctcctgcctcagcctcctgagtagctgggactacaggtgcccaccaccacgcccggctaattttttgtatttttagtagagacggagtttcactgtgttagccgggatggtctcgatctcctgacctcgtgatccgcctgcctaagcctgccaaagtgctgggattacaggcgtgagccaccgcacccggcccataattactatttctttcattatgttctggacactccaaattttcaactacagggtccagcctttgcaatcaggaaaaaaaaagtgtttaaaaacatctctgaggacttacatataacaccagaaggatttatacatttatttagttaatgtggttaataaaaccaaaatattctttaaaccatgtcttagcttcattcttgtctgcaatactttggcactgcctggatttggcatcatgaactgctgcaactaaaataacagtaaggtgcatttatacaaaggaagaaatgagagattaaggtcccctgttaatactaaggagcctgatagattttgatatgttttgtgcactggtatctgtattttcattttattgatttttttctaaggaccttacagctaaagccaggtccccaaagaagtcaggggtttttgtgttacccacaacttggcagaatgtctgcaattactccttctgcttttaactgactttgaatcctctccttttggcttgagtacctggctttcagccaggagaagggaaaatactctatctgttggttttcaaatgtcatttcccctttggctttgttgatggtaaaattctgcctttgcatctgaaattggaaactcttctaatcctggagtctgagtgtaattaatcggaaggctttctcttatctgtgtctaggatcagcctttagtctgatcttcatttttatccaggtgcaaaactcaaatacttttacctttagtgcagtggcccaaattttgtccctagttctgcytgtgctatcattaactgtcattttttaattatatctacacacgaatgtgggccagaggcagcaagatctggattttctcttcctctctgagtccctgacccttggattgttcttccttcttttcaattttggtgggttctgggtttagatttgtagcctaacctagtcaacaacttctttggcatagaaaagaattatttctgatgtgtatattttcccagaagttagaatacccctttgatatatttatttgtgtttaatccacagaaagaatgaagaattaagttatattaacaagagtatcttgcagtatatatatgctttaaagttcacagtgactttgacatgcctctttcatttagttwtcacaactcttggaacgtgtttttgcccattttctgcataagaaaactgaatttcagtaaaattaaattgtttttcccaggcaacccagccaggaatcactagtccccctctctcaaaatccagcatttgctcactagaccagagctgctttaaatgacaatagtgtatggaattcattatagtagaatccattctaaacacattgttaatggtttgatcaaacatctttagtagcaccttttcattcatgttttattatgtatgtgtgctacccactttctgtgcagaaatttcaaggaaaaggaaattaggctttctgtaatactcctaatccctgtccttaataagtccaaactctttaacatgatacataagactttcactatccggggaccccagggtactgcaccattctcatccatgtttctcacctctaagcttgtgatactcctgtcatgcagcattttcctttgttgtccaaacgtgtcctgctttaaatgttaccattctcaattctcatctgcctggtgaccttgtgtttcagtggttgtctggagcgttagtgttcattagaataacctggagggtttgttaagacatagcttcttggacgcccacttccaggtttctgattcagttgatctgggccctgaagttgcctttctaacaagtttccatgtggtcctcttgctgctggtctggcatcacactttaagaagtattattctacttatccttcaagacctcaacctaattgatctacagatccttttccaactataggaatatttaattgcttgttactctatgctttcaagctcttgtttgtgtaacatctcacattttttggtgactatttatgagtgtcttctttgcttaactgtcttccttttacaagggaaaagacttgtttgacttgtgtttagatcctcatgggctaacatgatgggaactcatgaagaatttgtatgaataaataatgaacctggaaacctttgttcatttaaagttgcttgtacaggatgaatgttttgcttcattggtttccattattattgtcttcgttcccattcaaattctgtttctaggcaaactggaagaggaaaactatgtaaactgaaaatacaattctaagcctcccaaccatctgagtggaccccttctctcaaccaagggcattccaaagttaacctgaaaaactagttcaggccatgataggatgggggagtaggacatgcctcaatattccctcctcccttctggaactcaggcacagctgaccagtattaacattaaaatagattttaagactgacaaggcagactgtttatagcaataagataccacattccagcctgaatctagtatagtatcacctgacagatagcagaccctgaaagaaatcaaagtattttatctcaaattatggttttttgccatatcttggaatagtcctgcaaatctgtctctcatgaggaaaatccacattctgaagagaatccctttccttttccaggcctctttcctgatccagaagaaaatcaactctgataagaaacatttacaatctattctctctgaagcctgctacctggaggcttcttctgcataatgggaaccctggtttccacaaccccttatcttgacccagacattcccttctattcattctaggtctttagactataacttgactctttcatccaattagaaaatctttgaagctgtccgggcatagtggctcatgcctgtaatcccagcactttgggaggctgaggcgggcagatcacccgaggtcaggagttcgagacaagcctggccaacatgttgaaaccctatttctactaaaaatacaaaaaaaaaatgagctaggcgtggtggtgggtgcctgtaatctcagctactttgaaggctaaggcagaatcacttgaaccccggagacagaggttgcaatgagccgagatcgcaccattgcactccagcctgggtgacaagagtgaaattctatctcaaaaaaaaaaaaaaaaaagagagagaaggaaagaaaatcttagaagcccctcacaccttgccacttcaaattgtccccccttttcaaatcaaaccaatatacatcttacatatattgattgatgtcttatatctccctaaaatgtgtaaaaccaagttgtaacccaaccatgtaaggcacatgttcttaagatctcttgagggatgtgtctcaggctactggtcattcacatttggctcagtctaaatctcttcaaatattaagagtttgactctttgacaactaatacatatatattttaataaccactatgtgccaggaactgtgcttcatatatattattgtgtaattctcaragtaattcccatgacataactatagtacatctgttttaaagatagagaaactgaggctcaaaaagactaagtattttgtaaatattctaagactggaaataatatttgatttcaagattttcttattccaaaatgtgttctgatctgctgctctaccccatctctactaaaaatacaaaaattagctgggtgcagtggtgcacacctgtaatcccagctacttgggatactgaggtaggagaatcacttgaattcaggaggcagaggttgcagtgagctgagattgcaccactgccctccagcctgggtgacagagcaaaaatctgtctcaaaaataaataaatacgtaaatataaaattaaattaactcttgcttgtctcatgacaggtaaagatgatgggacagtggctgcctatcttcagataaaataaaggtaatctccacattaacattactagcagtggttcctgctctcttctttcttttttttctttgcatccagattcaattcctaaattactcccagtatgacagtgatttctactgtgtttctccttcactctctgcagatcattgaagaggtagctgcaaatgcctttcacttgcatggcttttccaaaatgtattcagattggctgaatttctgaatcaaatacaatttattttctctcttatcctagcagaagatttaagcaaagagatatgtaaaatatattaaaaaatttttaagtttccttttttttttttgaggcagggtcttgctctgtctcccaggctggactgcagtgatgtgaacatagctcactgcagcctcaacctcctgggctcaagtgatcctcctgccttggcctcccaaagtgctgggactacaggtgtgaatcactgtgcccagcttatttattctttctttttttttgtacccattaactatcctacctctctttgtcccaactgcccttttcagcctcttgtaaccatccttctattccctattctcatgagttcaatcattttgatgtttagatcaatatgggacttatatttttaagcattttgatttaattttcatcckttggccaagcttggtgttctgcatttgcaaattttgttagggtacagggtagtcatggctgcaatctggagaaaataatattcaagatagtgttccaggacttattattatcatttcttactggtccattggctgagttggaataccagctaatttattagatataccctatgcttccattgtgcaaacctcagcctatacttggctacattctcttgtaaacattttcaagctttttaaaaaaattccaaggttaaatttgagttgtagaaaagaaatatgaataatggccatcataattattccattataaaaacacatacacacactcaataaaatgtgttgttttaaaattattaccctaaggcaagtggtgaatagatccaataaaaataaaagaaatagaatgaataagaagataataagacgaatggaagactacattctttctactgactggtcatcggtttttctaaatcttggtcctttatctccaatgggtctttgaggacaagcacatcttatgtactttgtaaatatttgctgtttatgcacattttgagtatcattgtttagctttgcttttcagatgcatgaaacaagtamatttgaggcagcaaatgagtaatttgtaaatctagacacaatgagaaggcaattaagaatgctgcttgatgaaaaagaataagagaataatgttgtaggtaagggacaaactaatttcactaatagtggctttatatacagtccagtatgtgaaaatacttaagtaattaacattaacattcacactgtcatcctaggtagtgataagatactggcgaccacacacaaaaatggaatagatatctgtgtctgtaaaactaaaaactcttcaagggagaaaaagctctagtgaaaaatggaattcaccaggaagtcactcaagagaatgcaagtattaaaagcactttattataagataaggatgtcccattcttaaaataatctcctagggaaggcttcaaggatagcattatactaagtagagaagttgtctgacaaataggtaagtataaaaatcagagaacctacagaaaacaaatcattctttgagttgcatgaactttaggaaagagtctttatcagccatgatcaaataaattggacaggtcatataacaagttagaagttgccaaaatttttttatagaagaaacagatgtcatcttcttttgtaaactacatcctgaacatatcccatcctgactgcttcgtggcgtatataaactcccactccacccccttttccccgtctcaagcaagctgacctaccaagctgtgtatttttaatcactttctatagcaatcaagaatttgccatcagagaaactgcttcactgcgtcttatctttccatgcctgttcttgctaaacagatttaagataagagcaactggcagtaagtgcccttcctgaaaacagaggtcacagatgtttctactgaagcccagtaaatggttttgggagacatttgaaatcttagtcatattcaaatcccaaatacaatttctcttttttttcccagaaatttcaaaggttttagaaatattttctactggaaaggtatctctcattcttactcaaaatttagacactaatgagtagatggcaagtcttgtttataagcattaatcrtgaagatgaacatttataactgaaaaaagatgttcgaattttggggtttgtaaaagaactaggaatggagaacatttagagttcactatgtggtgatattcacaaaagcaaatgatgatataactatgtcacttggaaggagcttcaggcaggttctttctcttctacatgtaacatgtaagcctgttttggggtcattgctgaggaaaactacttcttaagacaattttacgactgcattgtttcaatagtacaccaaactatgttggaaagttatgacctagaatctgaaaaagaaaaaagtgatgaaggaataatgaaaggctgcatgacagaagtatttagtcttcattcctgtgtttgaagcagaaaaaaaggtattgagggctaaccagactctgccttttgctaaattgaagagtatcacatcaaaggccaaagatccattttaacaggtgccttaaaaagttgtactaaatgatctctgtgcccctttggatcatgaattgtctacataactgcacaacgaatgaacgtaagaaaaatgaattggctggtgaagcctgtctggtaaacaatccatgatcctgagggaattgtagttttgcaaaatattcagcaactactttagtttaaatattttatatgactcattgaagctccaggaagatactactttcttctcaatatcagttcctggttattgtcatcattcctttatcagagtttgtttccttgtcaaatgaactcttaatacatgtatctatcactgacaattttgtagaaaggtcattatctgttctgtttcccactccatgaaacggaacttattccattcaacttcgtgtaaagtcttttcaaatgacacaactgtaattaggaaagatgtcaataactatttacagatatttatgttgtattcagaactgtactagttagagtgtgtggtttaaaaatttaaaaaaaaagtgggtgagatggtgagacttaactaccctattmcaccactactaggatggtaagaatttagtaagtaaaccagaaagttattagaaaaacaagtaggagcaaaataagctctgtggcattgaactaagaataaaatgtgaagagaaggggtgagctctattatctacttagggatgccttcagtagaaaatgggacttaaaaatgggcaaaacttaggagggtctttccaggaatgagaatgaacagatcctgggataagttaataaggttggatttattaatcacctgagattctcttttttgattattgggtcatcttgtacacatcaactctgattacaaagtaattagtaatcaataattatttctgcatgtgccactggataaccattcaatacgtaaaaatatttaggtgaaaactttgcttgccaaagtttcaaaagttaaatacttaccaggctattatcactatagaaaacaaaggatgagacgttactatgaaaaggatgggtacaaaagtcatttgaagaagaaacgtactaataaaaatatatttcttaagtactttagtctgcaagtggcataattatttgtgtgcaatatccagaaatacatgcttcttggtgggttttaacagacatatttttacaattaaaaagtatatgcctaatttatgttgtggcagattacatttttcaaagacagttacactgataaatcccaacccacatggccatgttataggtgatgttgacactcctccattgggaggtatggaccagttttagtgactcactttcgtccaatagaacgtaacaggaataatgctacagtccaggtcataaaagggagtagaacttctaccttgttctccctctcatgatgttagaccttggaacacagccacatattgtgagaaagcccaaactaccccatgtagagaaatcacatggaaaggcccacagagagaggaactggggatccagctgatatttagcatcaattgcaaaatgtgagtgaaggaggcttcagatgattctggcctagagccttcaacttttttttttttttttttgagatggaatctcactctgttgcccaggctgaagtgcagtggcgcaatctcggctcactgcaagctctgcctcccgggttcacgccattctcctgcctcagcctcccgagtagctgggactacaggcgtccactaccatgcctggctattttttttgtatttttagtagagacgggatttcattgtgttagccaggttggtcttgatctcctgacctcgtgatcctcctgcctcggcctcccaaagtgttgggattacagacgtgagccaccgcgcccggccgagccttcaacttgattcttccatgagaggccctaaacatcatggcaaagagtctaaccatctccattgtgctctgtctcagttcctgacccacagaatctactagcatagcacctctaagttattgagtaatttttagatagacaataacaagataatatgtcaatctggttttcatatctaaatttatactggctccagatattcacttaagattttatcttggccaggcatggtggatcacgcgtgtaatcccagcccttcgggaggccgaggtgggcagatcacttgaggtcaggagttcaagaccagcctgaccaacatagggaaaccccgtttctactaaaaatacaaaaattagccaggcgtggtgatgtgcgcctgtaatcccagctacttgggaggctgagggaggaggatcatttgaaccctgcagaggatgtggtgagttgagatcacaccactgcactccagcctgggtgacaagaatgaaactctgtctcaaaacaaaaaaaaatttctctctaatatacaaataatatcactttcaaaaatgtatctgctcttctaaaaactcagtttccaaatagtgggctagtcattttgccaaattttagaaaacagttttaaaaaatcacacgtagctccaaatgtggtgcactttccttggttttgttcagtgctcaatacattgatgttgctaaaggccatatcagtgccctccgaccatggaagtttggccataactagttcaagccctgaagaactgaccctgggagtcaatccatatgctgctttgtcccaccaagaagaatctctcttctaagattttgaactaagagattgagagttagagagtagctatcgctgaagctgtcaagatcatctagacttgtaccatctcatgccagtcagatgactgttattaaaaagtcaaaaaataacagatgctggtgaggctacagataaaagagcatacaaattcactgctgcttggaatgtaaattacctcagctactgtggaaagcagttagtcagtttctcaaagaacatttgacctggcaatcctattattaggtatatacccaaaggagtataaatcattctaccataaagacacacgcatgcatatgttcatcgcagcagtgttcacaatagcaaagacatggaatcaacctaaatgctcaccaacagtagactggataaaggaaatgcggtacatatacatcatcaaatactatgcagtcattaaaaagaacaagatcatgcccagtgcaggaacatgtaaggaactggaggccattattctaagcaaactaacactgaaacagaaaaccaaatgctgaatgttcccacttataagttggaggtaaacactgagtacacctggatacaagggaacagtagacactgaggcctactggagggtgggaggaaggtgaggatcaaaaaactacctatcaaatactatgcttatcaactgggtgatgaaataatctgtacaccaaacccccataacatggaatttacctatataacaaacctgcacatgtatccctgaacccaaaataaagtttttttwaaaaaaaataagatcatctagacttgggtaggtggccattgtggacatcatacaagcagaagaagctgatctatggagaagacccataggacagtagtattgagaaagcatagagtcccagagagagacaatccagtttccacagccttgactaatattattgctttataattctgtaaaatttcctctgaagccttccagtaagctccttttccacaaacaagcctgtttgactagcttcttaatattaaaaccaaataatttctcaggtggcaataagggggaagtggagtgcattggtcacacaaaagacaacaacatgaaaatcttaattgttttcagtgtcaaacacttgagtttctggagacaaaactccctcttctaagaaaatcaaactattatacatgataattgtcactttgttagttaagacacatttatacaacattttaagatttggagggtagatactttattaataggtggtatggttctgttcttaagttatgtttctgatttttagatagatcattccctgtttctgtttgtgggaaaaatggctgtctcagtaggctgcattataaactcagttggaaaaaactggtttatttgttgaatgagaacttcatttattttgtgtaaatgagcaccactttttattattcacaggttattgacaagcataatattaagttaagatgcttgacattaaaggattaacatgtacaaatttgaaaaacaacagccgcctagtagacactcagaatttctgttcattgatcaactaagcataatatctctgctctttagcaagtggtttaaaaaattgatggttattagtagtataaatcttggaaaatttgcagagaaaatataatttgtctattctaagtatgttaaatggtttaaatgatatgttaaatagtttaaatgatgaatagcgtgaacaatattagctatactgtattagccattagccttgtaacaaattactcccaaacttaccagcttaaaataacaagcatttattaactcagtttctatgggtcaggaatccaacaacagcttcatggaatgaccccaactcaaggtctcccatgtgactgtcatctagctgttggccaaagctgccattttaaagacatgaatgaaacaggattatccacttccaagctcactgtgtggctgttgtcaggaagctttagctccttaccacgtgggattctccatgtggctatttacgacatggcttccctcagagcatgtgacacaaatgatcagagaaagatctaggtgcatggcctcatctcagaaatgaaaatccttcagttttattgtatcaacacaggtacgatgtaggagggacaatacagtgtgtggaagctggagatggagatccttgggagctgagttggaggctgctaccatagctatatctcttgctagagttcccgattttgcagcctgccatcacctcacctaagactgaacagaatcactgcctagatttacaatatcccagtatattctttttcatgtgcactctcactttacatctcaattttcattccgagcagtacttttaagaaagaattatcttcccctttaatgtgaggaaaaactcccctgtgtataaaaacaaaataatcattcaccatctctttctagtgtgtgacatgcagtgagatttaacttcattgctttgttagaatattctgttctctgtggagggccgtgtttttaaaaaatcactcttcagtttctgctgcaaaaataaaataaaattctctgtgaagtttgtcaagtgaaatggacacaaacatggctcaaagtctagaggaaataaaatgaagccacaatctcagtctatgaaaaagagataagttaggataaaactacagcaaaaaatgtacaggaaaagaatgctgctctttaggagagaaatcagaaaagtcagaagataaaatacagagcaaaaagtttactgatcccaacagagaaacaagaaacctcagagcacttatatgcaaagtatttgcrgtgttttggggcccactgactgtaagggaaaccaggtatacacagctttagggcacaatggagagaaagctcttgatatactctcctgagtctcataaacagcaacatcctccaacgtaaatgacagtgaaagaatatgatgaactcctgatgggtrgatgccacaggaggatccagccttatttttcctcagctctttcctcaaggaaaagactgggaattgataatactaaattgacaagtccaaataagccttcaggcaaagcagatgatccttttttttttttttttttaagtatccaaaccagtctcagatttcttcagccagaaagcatgtttttgcaggctttttacaaatcctaagcaaagttatgtagttctcgagagttatagaaaaccaggtttgcatcttggctctgatacccctccctgtgatactttagaaggcttacctggcctctaaaaacctccatcttctcatatgtaaaacacaaaaaaccctgacacatagtatgtgctttgtaaactgtagctcttgttaatagtgaataggttttgtttgtttgtttttcccaaaagaatttgatgcttgtgttttgaggagttaaaattctcaatgtaatagaagactctataataaacttacgtcttcttagggtgatacgaaaattattaaactcaatccccctttagttgcaaacaatcaatactcaataatttttttgaattgatgaacctctgattgtgtgcractatcttaattatgtctatattcttggtcttgtgatgaaaagtatccagaaaatgtctactattcatcactgtatgccttcttctttttagcacagagctttgtacatacgaagttctcaactaatgtctgttaatttaaattgaagaagctttagggagttactacaatttaggtctggaactcacatcccattttccttcttttgtcccacccctacccatttcagccatgcatatgtgtatttggagccctggatcttcaaaaaggcagcaaggagctaattaagccattaatgaattaactttattttttgaagtttataacttatttagacttagtgatctttctttgctcattaacacctctccctgtaggcagagagaaaaaagattaaaatgtgactctgtgaattcttaggcccatataaattcctaagtacaggggaaaagcatcgatttgtaagtcaacatgacattagtcagaagtgttggtttttctttatctgcaggatctgtttccaaacatatttgatacccaggacttgaaactacatcaattatttgaggaatcttgttagggctccatttgtatggagaggtaacactcactggtggcagtggtttgtgggtagaaggggccttcgggtatgtgcggcaaccttgtcaccagaagctgacaccaacaatacacactcacatttaaaaaatgccaaaattgtatccatcacctccaaaattttccttatgtgaaaggttttggcaaatccttgccagattttaaatgattcattctacatttgtatttcacagttataaagcagaactttgcacaacaagttaacttgccaaaatattatgtaaatattgccaaaatattatatcatcaaaatattgtataatatctgtgtattactttttgtattatatatttgtattacataatttgtgtatttatttgctgcttatttaatttataaacataacagaaatataagggaaaaaaagccagataaattttccagaatagatgagaaatggagaaatctgagtccttccttcaagttcattgattatgagttgagtaaccatgatatgctagtatcttttcaaatatataattttttgattatataaagataaggttgatcttcatctcagacaattttccagcctagtagaaacaataaacacagttggattgtaacccaaacttcaactgtaggtcatctcacctaagttagtggatatttggtataatgtttagtaaaaagytacactttgtggcccttcatcatagcaaatattggctttattggcctttaatatcccaaataagaattatcaagaaaataggctccattttcattattaagtatttcagagaaataaaacaataatactgccttaccattgtaggtcattttatagtttccaagggttttcaactatatctttttttaaaaatttgaactttataacatccctttacagagaagacattttacagaggaagacactgagcatcagggacattcagtgactgctggctggtaggcagcagaggtcttgaccagacccctggcttaatcttcagagttcttccatgctgatgcatggaagacttgcccaaggaagttgtctccatatgaaacagccttgaaaataagatgactttcagtctagtttgatcaacatttatgtaaacatgtaattaaaaattgtttgcttcaactcaacagtatgtctctgaatgggaactggttctttctcaggaatattcttggctgaatgtgtctgtgctgtgtcatatgcctcctctttacatatgactgtgggagggtgtggctgtttctataaacactgaaaacagacctgtggctaacaaaggattgtgggtggcagttgcttttagaaaccttggtgaaacttttcaaaagaatgtttcctatcaagcggtgcgttgtacatgtgggagaatccctgacagcacgttgctcttcctggagctccgtgagcatttattcccagtaatgtcctttggtgcttctttccttcatcccttaaygaacctaatccactctagccactcttcgtgatgtgaggtcaagagggtgaacayggcagatgtggcatttatgcgattacattctggtggaagaaaatgggccattaaaatgcaaaccaaaaatcaatgatctgattaattgcagattgtgataactgtaagaaagaaacagagtgccctgataaaaattaagtacgctgacttatttccatagggtttctgagaagatcttcactctggggaracaatatttaagctgcgagctaaaggatgacgatgacacataggaaagaatgttccaggctacaagaccaatcagaacagaagccatgaggcgggaagaagctacatgtctctaacttctagtcagtatgaccagagtgtagattgagacagacatgcagcatagaatggaatgagatgaaaatggagacagaggcgggatctagaatatgctatatcttgagtcttctaaaatgtgtccagcgtctgttctcagtgcaacaataaactatcaaagagttttaagcagggctatgagtttatctgacatctgttttaagaggtcattctattttatatgagtggaagagacatgaaaaagaccagttagaaggctaccagaacagtccagcagagagatgatgttgggagcaaataaagaattccactgtggaaatgtcacatttgagatgcccaagagacatctcagtagaagatttcaagcatccattgtatataaaaggctagagctcaaaggagaagtctgggtcagagatagatatttcagagttttgaacatatatgtgatacgtaaacaggaatacagattaagaataggggataggatcaaaccttgagaaattcgaatttttaagataagatatggaataaaaagataaaactgtgaaggaaagtcagcaatgtgaagggaagagcaagagtgtggagttgtcaaagagaagaggatctcttgagaagaaaggagtgtttgatttgaatgctgctgagaagtcaatacaaagaaggcaggttttacaacaggaccagcctcataattagtgcatctttcaaggagtgtgaagtactttcttcactgatttctgacattccgatttgtcttactttacttcattgcaccaggaggaatttgaagatccatccaagttgtcagccatgaaaacaaaagtgcagcacgtgagccccagctgtgctcctacctccttggtttggtttccatgagtagttaagcttagaaaaattgtgaagaaacttgttgtgtgggagcgatttttcaaagacctacaaacagaagtaccacttgacccagcaatcctaaacttgtatatatacccaaaagaatatgaatcattctatcataaagacaaatgcatgtgtatgtttattgcagcactattcagaacagcaaagatgtggaatcaatctaaatgctcaccaaccgtagactggataaagaaaatgtggtacatatacactactgaatactgtgcagctgtaaaaaagaacaggatcatctccttggcaggaacatggatggagctggaggccattgaccttaccaaactattgcaggaacagaaaactaaatacctcatgttctcacttataagtgggagcgaaatgatgagaccacatgggcacatagaggggagcaacagactctgggtcttaccagatggaggagggagagaatcaagcaaaataactaatgggtactaggcttaatacattgggtgacaaaataatctgtacaatgaaaccccatgacatgagtttacctaaacaacaaacctgcacatgtacctctgaacttaaaaaagaaactttttctgtatcttaggatcatgagaaagaatcacgttcaaagagtaacaaaattgatattatatttagacagggaatgggattgcaagtgaagaatctgtggaatctcttgatttgtgaagatttcttttagagttcagtaatggatctgtgacatccaatttttctagttaaagagaaagagcattgaactaagaatcagagacttggtttgcagtcccggattcattggttattggttgcttaaacttgggcatgtcacttaaccattctgacccctaatttccttatctgaaaatggtaaaaatcatacctacctgatagacttgttgtgagtgttaaaatgatgtggcttaaaacctagaggaggcattcaattaatgataccttatttttattaatattagcatattgggagtaagcacagggccaaatgcaatcatgtatagaaaagcattccgctaactataaaacattgaataaaatgcgctgatgtgtttatgattgataactgttttttgtcagctttttaattttagctgcaccatcttactttttggtacagatctatttactatctaggagttgtgggggacttggtgggtagccagaaaagatgacagctagcagagcttaggcacaggagcagatgtaagtgcaggtggctggcagtgtggggaccctggargcagctgctctcagggtaaaatccacgggaggactaggcagggtgagagagcatccccaggcaaagtagagtgacctgcctctgagagtttgggtgtagaatgcagcaggatgactcagaaaagtctgcagagctttagaaawgcttttttttttttttttttttttgatgtggtgtaaggttagaagactagaatgacgtttgtctattattcaggagatgttctttgtaggagaaagaaagggaaaaagaaaaagattccaaatattttagtgggcattatgtagttccgtctcttgctccttcccttaattccccctccagaggggaaacagatatctgtgaaactgaaaagcttgcatctttgtgagatctgctggagggaagctaccgtttaaacccagtctccattattttaaatggttttaagcctcacatgtagtgctatttatttttccttctaaaaaayatttctgggttatgcctccatatacaaaactcacctttgtgccattgtgctgttttgatgataggtaatttagctagatttagctaccatctattgagcacttaaaattaatctctgtaataaactctattcaggcatttcatcatttaatttaatacaaaccctgtagaaagtggatatcactcctcttttgctaattgggcactgaggtttaaagaggttaagttaatttctcagtttgctatagctagaatggaataggtccattatttcaatataggtttgccagactccaaagcatgtactggaactactgtggtataaaacaatatccactccttagaaagatcagcatattcatcttctatgtcctatttataagtgaaccggtgtgctcttccctctttattgagatttttttcaaagtaggaaaaagggaaggaaaaagcatttattgaccacatgccatatgccatatttctttacaaatattttcccatcattcttagaaataaaccccaaatgaatatttttgtccatgtctttcaaatgaggagattgcttagagaagttgaggagttcgtcaaaatccaccatgcttatttattttcttttcatcttacatttttacatatctagtgattgtcagatactgagttatccagggttaaacagaagttacagtctgtgttaccaagggcctcgtagattactggagaagacaaagatgcaaataggcaattataataaaaaatgctacacagacagacaggaatatattcaagtcactcttaggcgcttctcctcccaaaacttaatcccccacttccattacgccatggtgccttccagaattagcgcagttygcatactgaaggaaactgaggggtggtcagaaacccagtttgtgcaggaaaaaaaattgtggagawcaaaattagcttcagtttttaatatcagccattaattctgaggaacaacttcatccacttaacttgattttccatcttccttgagtcccaaggcaaaactgaaatggaaaagaatctacaggatgctttcatttagcaaagaggcaaacaaacccaaatcgagcagtacatcatagcaacccactaattggaagtctgggtaaaacatctctcatcccatttctaagaacttagctatttatccaaagcaagacctcttgccccctggagctctattccccaaagagaagacttctttaaagagatcgtccttcttagaaaaggagatttttctttcccattcagatatttctagattggttcacgtggatagagaattctatgccttttttagccactgtgactcagatataattcattttgccttaaaacgcaaagcatcagtaaacattgttagcattgttatgtcacccttttttttttttggttgttcacaaattttctttgttaaaatcctgtgcagctttttgaattcacactaaagaactttaaatttccaaatgaagaaatttcctggccagtttttggttttttttttttgaagatgactgctgcctgagtgtcaacatttgagaaaatatagaatttaatttttggaagtcactagatatagcaacctgcctggtgccagagaagagctgtctatgctgtactgcaatttgacttttaatccatcgtagatctgctaatggtatggcacatgtgaagtggtaaattcttgagtgtttgagacaaacattttaaggtacccatacataatgttaagttcacgtttaggaaagtagtaccagttaataagattacttatttgaaaataagaccagtttatttcaatctggatattcgaattatcaaataatctttttttttcaggattttcttggtgtatgttacctttttagtgaaggaccagtgtctcagagctttattttttatggtagtttaattatttaactgaaacctggaagaattaatagggtcagaattttagatcatgaaacatattttattgctcagtggatgatattcttcttggtattatttgctcttccccagagtcaccatatggtataaattattttaaattcccacaattatcagttatgtatatactaataatatcaaaatcatttgtttgggacattttttgtaatttattgaattttcaaagtcaattttgttcagaccattttttttttacaaagtagcttaaaggcacttagaaactgacagtattggatatttcatacgattttttagaattgcagtatctgccatttatctgaggactggtgattcaaaaactctgtttttggttaattttaattaaaaacatgtccactcaaaatactgctcaatacccaaatcattgcctaccttgtatatagttatttttcctaagggcaaaatagctaagaccataaattacgatggcaggcacatggtttgctgacagaactatataaaatactgttttcatcctcatgtcagctctggtacatgcctctttactttaattccttggggaatctgttgtaagttatagttttaaaaaacatccctaccccactagctctgtcagcttacctttttctgactgaccattttatttctctgaaagaacagatagaaactgagttatgtcttagctgaacttgtagtgccctaaatattaatagctgtgaaccagtttagtttaatttggatatttcccaatcttacacctgcgatattgcaaggtagttataaaaagtacacagaattcatctctataaatatatgctcattttatatcctttacaatctgtttcctagattcctaatccaaagaggccattagtaccaatgacatgatggatagagtaggttataatgtttagcagctcattggagatgacatagtttgccaagttaatttacacattttcatactacatatattatgtacaatattttttgtatggtgggttttcatcgagtacccttctctcttgtaagaaattattttttaagaaacatgttaaagagtaaagatgttttaaataagcatttctcaaatggttggtccttactaccaagcatattctggaactgacactttagttttacttacttccagcacatttcatgggaaatggagatgtccaaggaaacaggaagacgttaattgatgatacattttcttctaatattttgatatcccccaaagaaaaaaatagtccaggagatagattatactagaacagtttggctacattatctaaaagtatgttcccatggaaaattatataataggcttagtacattttagaccatttttttcattttctttttttttattattatactttaagttttagggtatatgtgcacaatgtgcaggttagttacgtatgtatacatgtgacatgctggtgcgctgcacccactaactcgtcatctagcattaggtatatctcccaatgctatccctccccctaccccacaacagtccccagagtgtgatgttccccttcctgtgtccctgtgttctcattgttcaattcccacctatgagtgagaatatgcggtgtttggttttttgttcttgcaatagtttactgagaatgatgatttccaatttcatccacgtccctataaaggacatgaactcatccttttttatggctgcatagtaatccatggtgtataggtgccacattttcttaatccagtctatcattgttggacatttgggttggttccaagtctttgctattgtgaatagtgctgcaataaacacatgtgtgcatgtgtctttatagcagcatgatttataatcctttgggtatatacccagtaatgggatggctgggtcaaatggtatttctagttctagatccctgaggaatcgccacactgacttccacaatggttgaactagtttacagtcccaccaacaatgtaaaagtgttcctatttcttcacatcctctccagcacctgttctttcctgactttttaatgattgccattgtaactggtgtgagatggtatctcattgtggttttgatttgcatttctctgatggccagtgatggcaagcattttttcatgtgttttttggctgcataaatgtcttcttttgagaagtgtctgttcatgtccttcgcccactttttgatgtggttgtttgtttttttcttgtaaatttatttgagttcattgtagattctggatattagccctttgtcagatgaataggttgcgaaaattttctcccattttgtaggttgcctgttcactctgacggtagtttcttttgctgtgcagaagctctttagtttaattagatcccatttgtcaattttggcttttgttgacattgcttttggtgttttagacatgaagttcttgcccatgcctatgtcctgaatggtaatgcctaggttttcttctacggtttttatggctttaggtctaacgtttaggtctttaatccatcttgaattgatttttgtataaggtgtaaggaagggatccagtttcagctttctccatatggctagccagttttcccagcaccatttattaaatagggaatcctttccccattgcttgtttttctcaggtttgtcaaagatcagatagttgtagatatgcggcgttatttctgagggctctgttctgttccattggtctatatctctgttttggtaccagtaccatgctgttttggttactgtagccttgtagtatagttggaagtcaggtaacgtgatgcctccagctttgttcttttggcttaggatggacttggcgatgcagactcttttttggttccatatgaactttaaagtagttttttccaattctgtgaagaaagtcattggtatcttgatggggatggcattgaatctataaattaccttgggcagtatggccattttcatgatattgactcttcctacccatgagcatggaatgttcttccatttgtttgtaacctctttaatttcattgagcagtggtttgtagttctccttgaagaggtccttcacatcccttgtaagttggattcctaggtattttattttctctgaagcagttgtgaatgggagttcactcatgatttggctctctgtctgttattggtgtataagaatgcttgtgatttttgtacattgattttgtatcctgagactttgctgaagttgcttatcagcttaaggagattttgggctgagacagtggggttttctagatatacaatcatgtcatctgcaaacagggacaatttgacttcctcttttcctaattgaataccctttatttcctctcctgcctaattgccctagccagaacttccaacagtatgttgaatagtagtggtgagagagggcatccctgtcttgtgcaagttttcaaagggaatgcttccagtttttgcccattcagtatgatattggctgtgggtttgtcatagatagctcttattattttgaaatatgtcccatcgatacctaatttgttgagagtttttagcatgaagagttgttgaattttgtcaaaggccttttctgcatctattgagataatcatgtggtatttgtctttggctctgtttatatgctggattacatttattgatttgcgtgtattgaaccagccttgcatcccagggatgaagcccacttgatcatggtggataagctttttgatgtgctgctggattcgttttgccagtattttattgaggatttttgcatcaatgttcatcaaggatattggtctaaaattctcttttttgtttgtgtctctgtccggctttggtatcaggatgatgttggcctcataaaatgagttagggaggattccctctttttctattaattggaatagtttcagaaggaatggtaccagttcctccttgtacctctggtagaattcggctgtgaatccatctggtcctggactctttttggttggtaagctattgattattgccacaatttcagcttctgttattggtgtattcagagattcaacttcctcctggtttagtcttgggagagtgtatgtgtcgaggaatttatccatttcttctagattttctagtttatttgcatagaggtgtttgtagtattatctgatggtagtttgtatttctgtgggatcagtggtgatatcccctttatcattttttattgcgtctatttgattcttctctctttttttctttattagtcttgctagcagtctatcaattttgttgatcctttcaaaaaaccaggtcctggattcattgatttttttgaagggttttttgtgtctctatttccttccgttctgctctgatcttagttatttcttgccttctgctagcttttgaatgtgttttcatctaaatatttgttatattttttgatgaagggcaaaacattttggttacagtttctttgaatatttcattccacttacgcttttcaaccaaatacaataaaaaaagcaagaaggggttgtcattcttttttttttttcatttgttcttcaatttagcattgaaatattaaatccaaaagacaactacctttagtatgagattgtatattttgaaaatgtgcagaggtttaggtattttataatagtgacaatttacatatttataggaaatatagtttcaaatagattttaaggaggcagctgttaaaatttgacatattactgaaacttaattagtaatatcgaaatatttcagataacacagggatgactgagctaacctgattcaacacatcagttcacaatgttgtgaagaacacattgaacattttcatggaacaatgcattctgctgcttacttcaagaattaggaaggtgaataagatgattcttactctcaaagagcttataatttagtagaagaaagacaataagtctgtgtgcccatacatttattaatacaaggtgggtccgggtcatatcttataatttgtactaagtgtcatggggtagaagagaaaaaaacatttaatgtgatttgaaattgagaatgtttgtgtggatatgtattttatataagatacttataaaaaactaaatgcatcaacccacagattttttgtcttatggcctctgttagaatggtagaatgggaagaactatttgggttgttatatacacaggcctagttattattcccttgagtaaaatagggctttgttacagctaacctaataagaatatttcagtaatcaaatatttaaggaacattgttgaggtggcatggaaagtcaacacaaaaaaggaattccacttgagctgtaattttgttttatttgcttagcgtagattagaattgtgatacttgtactgttagttgcactgtacataaatattttgaattactgtcgctgattggaactaccttcgtgctttaaattaaaaaaaaaagatgtatctgtacattctaaatagtaaaaactctttttggctcaaatcttttaattctgaaggaatatactggcagatacttagtagacataaataatcattaatgcatgtatggtgtatttcattcagtagtaccaaaatctaaaacacattgagttgtctggcatggtttcattgccaaaagttgtgatgtgactctgatgtaacctggtttgttctgaacaactccaaatggttcttcagacttgcccaggatccatctggctcctgggaagccttatgttatcatggctataatcccagactctggtgacagtctgcctgggttcaaatccaggctctggtactcactatctgtatgaccttgaggatgttggtttgtctgtttcccttgcaaaataatgaacattatattccctatctcaaagggttgttgtgaggatactctaagataatgcaggtaaaagtgggatgttaacagcatttggtaagttgtaaggactcaggtgctggctatgtaaaaataaacttttttaagatggatagatacatagatagatagatagataggtagatagatagatagatagatagatagatagatagatagatataaaaacctatacctgaaaacattattttcataatatttcaaaagcttctattgtactatctatgcttttatacatagtaaaagcagatgacatgctggtcctactaaatttacaggttaatttttagatagttactaagaaatcaaactgtgtggaattttctggtacaaaattacaatatgcaataccttcctactgaggtacccattactgaatatttcttttctatcatatgtgaaatgcatcaattttaaatatttggagacatacctaatttaagtgaaaatctcggtatttcctgaaagtcgccacactataacagataaccaatcaaatttgtctagcttataatgtctgtcagcctgggtgatgtggatgggccactgtgttctcaactgcactgtctcagtgattggagccagttcatgaagcgctacagcctgtaggatgccaaggaggttctttttcgtaatcacacacaagcaatgtggtaaaaccctcaagggatagcagttgctttcacaatctatttacacacatacacacacatacacacacacacacacacacacagagttctttgttattttacatctggcaacaggaagagcatgctggacagacctctggcatcataaaccatccttccctctgacctctgtgtgaatcagcagactatgatctctgcagaatttaggattaattgcagcaaagaaaaagaacctctctgaaatctaaaatgtagacttggtcattagttcattttgcatgctgtggaaactatatttggcatcattaacagctgcttccatgagatgttgagcactaaaatatgattggtgaacactcaggattttattttgtggtattggttgcaattatggagatgttgatagatcaatttccacatcatctaaacccttaactaagaaataaagtggtacataatatgcatgtcccctctatatgagactttgttaattttcttaatttaaaaaatttttttaattctatgaaggaaaagaaatttctctttcagctgatgtttccctgaacacacattgtgatcatttactatttcctaagtgattcaagcagcaatcttgttttagaatatttcaactgaaatgccagccctggaatttcagtgctgattttaggaattattctaatgacttcttgacaagctttacctacatcaggagcaagtgaacttggcagagttgggataggagacttgcctccaaaatgttaacttatatataaccaccttgttatcgcattagttgttttcatggtggctgtggtggtcaatagcagaggcaatggaatgagctgtaataagagtcagcaaatctgagtggacttggcttctcccgtttgccatggtgtaaatatccccaccatgattgttttcaggctaccaacatgatgtcactaaatgtggaattgagaagggatgtccaaaatatacatcaataaatcagccctcatttgattttcttctcagtgaactatgtggttaaatgacttttatctacctttatctcgccattagcaggagacattatggaaaaatataatgccataaagtcacctctatgtcattgtccttgttagaataaaaattaagacctctaggtttacttttatgggttgagcctttgacctatctgtggaagtggtaagctggaacaacaaagaggaaaatgagagtctgtgcttttaggcaggtagttaatgaaggaccaggtaggaatgaagaagccaagttctagtccaaattgccattgattatctagaagattttggacaattcacttcatgcagtagctcaacatccatcaaagagtttttgaaagtctattatgtgccaggtgttggaagatgtgaaggtgaacaagcagatgatttcaccttaaaagagcttgtagcttagtgggaaggaggaaaaaaaaggaagtaataataacaaagtaagaaaagagctagcatagagctggggaagcaaaacacacagaatgaaagtggaacctgatcttgcagagtcctggaagggttctgggaagagatgactgtgtgctgagcaaggaagaatgaatagaaagtaggcaagaaggaagggtgagatgagaggcttcttgatttgattccagatctcaggttttatttcaccgttaagtatgatgttttagtctctcttttcttttttagaaaccttcactatgttaaaaaacagtttttttctattttttaattggcaaatagttttttttaaatcacaagtaagtattgtgtaattgtgtcagatttttttctgcacctattaaaataattgtataggttttcctttattctttaatgaggtgatatcatatcaaatattagaccaatattatgtatctgaaaaaatatgcacacacacatataaatgagtgtatttgtgtgtatatgacttttgagaatacattaatgagagagattgtactgtaagttttttctaataatacccttgtgatagcaaggttataatggccacataaaatgcattactaattgctttttatttctctttcttggaagagattgtgtatgattgctgtaatttcttccttacgtatttgggagaattcaccagtgaggccatcttggcctgaatttctattctggaaacgtttaaaattactggttttatttatttaaaagatttagggttcttcagattttacattcttctcatgttaactgtaagttacagtttttctttttttttaatgtgttgttattattttttgtatatgtccatagggtacaagtgcagttttgctacactgatgtattttgcattatggtgaaggcagggccttcagtgcctccatcactggaggaaggcacattgtacccaccaagcaaccttccatcatccactatctcccacccctcacccctctaagtctccattgtccacacattcatgatggacagtgtgcactctgcttccatgtgcacacattatttagctcccatttataagtgagaacatgcagtatgtgtctttccatgtctgaattattacacttaagataatggcctccagctccatctttgttgcaagttggtgtttttcaaaaaatttccttatttgggttgggcacagtggctcacgcctgtagtcccaacactttggtaggccaaggtgggcagatcacaagatcaggagttcgagaccagcctgaccaatatggtgaaaccctgtctctactgaaaaaaaaaaaaatctaaccgggcgtagtggtgcacgcctgtagtcccagttactcaggaggctgaggcaggtcgcttgaacccaggaggcagaggttgcagtgagctgagattgctccactgaactccagcctgggcaatacagggagactccatctcaaaaaaaaaaaaaattgcttatccattttattcaaattgtcaacttcattgacataaagttactgttcttatctttttgacatctgtaggatctctatcaatatcccttttgtttttatacctgatattggtcattcgtgctgtagtttttttcctcaataaggcttgttaagagagttttaattgtattagattttcccaagggcaaattgctggccttgttgatgttctctattgtacacttttttctgttttataaatttgtgccttttttttttcactttttctcatttctatttcctttgggtttgatttttcttttttgactttttgaattagagtatagattattgatattcaactttcttcctttctaatatatgcatgttaggccgtaagtttctctttaatgagtttcagctactttccctaggttttgacatggtattttctatattatttaattcaaaatatattctagcattcattgtaatttttctttaatccaggggttatttaaaaaatatgttgcttaaatttaaatgatttgaagattatgtagttatttttctgtatttgagttctagcttaattctaccgtggtcagagcatatggattgtatgattttggtgctttaaaatgaacttgttttattgcttatcatatggtccaattttgttaaacattcaatttgccctgggaagtaacatgcattttgcttattttaaaagcagtgcattataaatgcaaattaaggcatttatatataatgacatatatatgtgtgtgtgtgtgtatacatatatatgtatacatatatttgcttttgacttgtttcmtcagctactgggagaggtatgtcaaaatctcaaactttggttgtgaatgtactattctttataaaatttaaaactgtgttattaggtctataaacattaagaatgtttgtatatttttggtgtaatgacccttttatcagtatttttttcatatttatctctagaaatgctttgaagcctaatttgttattaatatatcaataattgtatttcaaactagattattcaattcatgtaaacccgatgtagttaatactttatgacaaatttatcgtgcttgagtttggtcaggattctcaattctatatttgatgtcttttatcaagttttgtaaatacttggcctggatatactcaaatatttcttttatctcaatctttatctctccatagcttttgggattctaattacttgtgtcttattcctttatgtcatgtctttatgttcttttctaccatttttatttttttctcaatgttttcatccagaaatttttctgacctattttcttattaattaatcttcttcttctgtgtcaattctgctatgaagcccgtccactaggttttaaattcaattatagaactttctgttcaaaaatttccactttattctttatcattgattttatttcactggtaaaattatctgtctggtcatctttttaaaaagtaatatgaataacagttatttattctaaaatccttatgtaactgtaatatttaaaccatccaccaggtccatttgtgctgagttttctcctggttttcagtcatttgattttgtatgtatgtatgcttggtaattttggattgggtgtcagaaattgtgtatgaataaaatgtaaaggttctggatgatgatctgttatctcagagaggaatgtattttcttcaggaaggaatttaagtacagatagaccagcttgatgcagttagaaagtgagacgattcaaggttttattcctgtcattctgacagcttgttattttcagtttctcctttgtcctaggatacagcccttcagaggtctcaaatgaaagacggggccttttttctttataggtcccaaactccagtttttgtctttcagttccattaaactatggaaagctctgagctactgttttctgttcagcctgtctgccccatcctgcttgtgaataagcagttgcctcaagtgaaataattttcctgctttctggatcttggtctgtcaagttctaactgtcttaatcattcctcagtatcttcaaacatttcccctgcatttatagttgttataagtactagtatgatctaagctattctgttatagctggaagcagaaatgctgccatcgaaagagattaggcattggaataatgtgatctgatttgcattttaaaaagatttttctgaacaacaatatcctcatatgtgcaatgaaacattttgataaaaattgttctctcaggcccttttcagctccaatattctgcaagtcttgagagtactaatagtgtgtcataccatgatttcaagctgtcaaaaccccagggcttttagttttagtaggctaaagttagaaaagcttagactctggggaaaatggccaagaagaagactctcatctttggtgtctttctatgtggcttcatcactgtacttcttgttagctttcagcaacatcctctcttttctgggtcttggtatctgggcacctagactatttttccagtaacctgaccactctctcctcatgtggtggtgccccattccacactctcttctaaaatgtttcatacttgagatttaaaattcactgtccatcctgcatttttctgattttttttagtaataaattaacatttattgggtagttatgtgccagacactgtgctaaacacttagatggaatattttattccatattagctctatgaggtagggacaattattatccccatttacagatgacaaaattgaaagttaggggagtcatgtagcttacctaatgttacagaggtaaagtggctgagatgaattctgatccctggaatgggcatcatttagaggggtggttcccaaaagccagtccacagactgtcttgttctctaatatataaaaaataattcagcaacatctaggagcataaatccagagattctgaatcagtagttcttggatggggcccagaaatctgaatttttttttccttttcaatgattacattttagtttactgtacaatgaaacagagaaaactactttttttttttttttttttttttttttgagacggagtctcgctctgtcgcccaggctggagtgcagtggcgggatctcggctcactgcaagctccgcctccggggttcacgccattctcctgcctcagcctcccaagtagctgggactacaggcgcccgccactacgcccggctaattttttgtatttttagtagagacggggtttcaccgttttagccgggatggtctcgatctcctgacctcgtgatccgcccgcctcggcctcccaaagtgctgggattacaggcgtgagccaccgcgcccggcctacttttttttttaaagatctgagagtgtgaatcttccacctccttttcaaccaaagttgaggaatttgtcctgctataatctcaacccttgagtatttctttttttaaaaaattttattattattattattataatactttaagttttagggtacctgtgcacaacgtgcaggtttgttacatttgtatacatgtgccatgttggtgtgtgcacccattaactcgtcattcagcattaggtatatttaaaaaaaaaaaaaaaaccttgttatctcagtatgtttttattatgcaaatttcctctaaataatgaaagctcctttttaatgttatattatgatagcaaaaggtgtgctctttgtagagttagcaggatatggttgtgtgacaaaaagccaaatagtattttaggctccaatgaagaggaatatctgtgaagggggtctttcttggtatttttgaagttccacttgaaagtgctgttggccatcactaatcatgagggaaatgcaaattaaaatcacaatgacataccaccttaccccccagccagaatggcgattagtgaaaagtcaaaaaacatagattttggcatggatgtggtaaaaaaaaaaaaaaaaaaaaaaaaaagatgtttatacactgctggtgggaatgtaaattagtacaatctctatggaaaacaatatggggatttctcaaagaactaaagacagatcaaccattctatccgacaatcccactacttggtatctacccaaagggaaggaagttgctttatcaaaaagacacctgaatgtgtatagaatcatcctaagtgcccatctactgatgagtggataaagaaaatgtggtgcgtgcatgtgtgtgtgtgtataccatgaaatactatatatatatatacacacacacacacacacacaccatgaaatactattcagccatttaaaaagaatgaaataatatcttttgcagcaatttggatagaactagaggccattattctaaataaagtatttcaggaatcaaaaatcagataacacatgttcttacttatgaatgagagctataggtatttaaaggcatccagggtggtataacggacattggagactaagaagcggggaggctgggagtgagggtgagagagaaataactatgcattgggtacaatgtacactacttgggtaataggtacactaaaatcctaagcttcaccaccatacaattcatctctgtaaccagaagccacttgtatccctaaagctattgaaataaaaaaaatcacaaagtgctgttgcctactccacagccatgcaagtttgattctggatctgagacaagctatgatcacattgttgtagagaactgaggtccttggaaaataaaacacaggttcccaaccagaagttaattttattctgctgttaaaatggaactatgactttkcttatttataagaactgtccttcctttttaaggttaaaacatgttattttattataatgcaaataatattcattatttaaaaatagaaaaataagaggcagatgtagttctagctcttaataaacctggctaaacttttacaaatttcatctgatcatttatatacttttctacatgattggacttatttataatttggatttttgaatagtgctttaacattttttacttaaattgtatacattttatagattatctcttgataagcattattttaatgatatatatgtataaataatatatattcttacataatacacacacatgtctatgtaatgacatatatataatattttgcaatggtgcatatgtgcttgttcccttaagatggatatttatttgactgttttcttattgttggattattttgtttcataaataacattctatgctgaaaatatttttaattgctataaattgcccaactaagacatataacttcctgttatcctttcactacctttgataacacactaaatttttctttactatatttcattcccttcttaatctcatttctaaaaactgtatttctgtcttacaatatatatatcattccttcagtactcctacctgttgatcttctcattgttatttactggcttgtcaggtcttggaagataggcttctcatacaacccaagcctstcttttgacctgactataaatattttattgtttacatcttcccctgcaaagaattcctctaggatctgcccctttcttgttctccaggcagtatgccttggacattctgtagctggctgggactgattccttgccaggtcagtaggacagatgtgtagactaagaaattaactagtgagttcaagtggaggttcctggcctgttggtgcctgtgaacaggattcttttgagtatgattagtgacatgaaggtcctgaataatatcgtaggcagaagaagtgccattactactcacagtgtaagaagtagcttgagttaactggtgaaagagctaaaagtcaatgaaaagtattgaacttttaaaatgtattatctattgaaaagtttaaaagatcatttattgattaaggaaattcctttgactttaatagctgtgagctctaatgggggctagaaactccagcaagtggtacagtttctagaacctagcagataatttttcattgactagaattccatgtgtgatacaatgatttggcaaagtaaatcacaataattattatgttcattgttttctcctttgtttaccttgattaaccatctttggtgattgtttcataattgttgctttctaaacaactttattgaagagctacaaatggctagctcttctcaaccctttaattagtgtctgggatcggtggatgttagttgaggggaaaaggttattttaataatttaagacaaaacaatttagaaattgtatttttttgaagacaacttgctatgtaaccttttataattccctgaatttttctgaaattgatgttttctttagtgtatagcagtgatagcatgaaaccaccactgacttttttagggcaacttgctggctaattttataaaatttgaactgcactatatgaatgaagaatcatctgtagcaattgctcttttccaaatgttcttttgcttcaaatgccgtatctgaatattagattgtttctccagatgttacaggctcatgtttccttctgctgaattcaattgttggttcctgcttatgtttctcaggatttgtatcatttctctgtcttaagtaaggtttttataaatgctcatcaatgttgtagagtttggattcaattcagatagaggctatttccaccggacttttgctcatctacttcctccctggagaatggtgaaaaacagtcctcttttccctcctctgatagggtgatgggctactattgctttctctctcctaatatattgagtacaccgacctctcaccgaaaccttaggtcaaagtgagaagaggtgattgtttttaattggatgattgctaccatatacttctcttttggtgggatcccaaaataaataaataaataaatgacactccccccaaaaaagaggaactaaaaaaaggctgagaaagcatgccatgaaggtccaggcttggacaacaagcataccatgatgtgaattttagccccatcacctactaactgtgtgaccttgggcaagcttttgaactcaccagggcctcaatttcctaacctataaaatttttgtgatcattattataattacaactaagaataagtaycttatcrttttgctgcaatacacgcgtgataattgtcctaaagtgcttagcatggtgtctagaacgyattatgtacttaataattattgtctgaaaaaataaacacatgaagaaaataccttattgtcaaagaatataatactgtgccccaacttgtgaaagattaaacctcttgtgtctccaggatttctaatagcttatcccagaaaggcagtgcagaggacatgtgggctctcttcctactgcagactcrggctrttctgatggtggggtccaagggcagccttgcttctgccatttgctcagttgatcttgtgaacagctgcggttcttgctgtaactacttgctcgctctcagtgactctgtactgtaaatgtttcatgtgaagragcactgctctaaaacaaagctggaaracagggaggcaattgccagagctgtcattgtgctgagtcagggaaggcttcagcaatcatccaaagagatgtggcatttacacctgcagctggatgggttatgaacccaaataggtccttaaaaaggaaggctcatctcctttccccccaacagccccccacccactcaatttttgcctactttaagggaaggtttttggtaactaatttttcatctgctcattaragcttaccaattacagcatgtgttacaaattataggttccaggactttgggtgaaatrtgcttcgtaaataatggcatattttgctgtgagcagtccttgattttggactcttgcattacctttcatctcgcaaattttccgtataggaatacttggatgtacaaatttcaggcaagtatccgatgtatcttatagaatcagctacccgacaatattgtcaaaaagagaagcaacgctttcagatgatgtaagcatagaatcaagcaaggagttggttgaatccttcttgtgcttttcctttgagatcaccttatttcagaatcctaggaggattgaaacattcctactttgatattttcctctggagatcacttgttaaaagtcgtcaggagtgacatttactagtcttgtattttctctggtcttaacttgaaaagttctgctcatcaaaaatgagtatgttgagatgatattttctatagaaattttgtattttacccccttaaaatcctcacttttcacatgaaagtgtatgctcagataaaacaagactcatggagagcacatgggtgagatcatgctaggctctcattgctaggctgagatttgcatttttctgaaaatcagagtgctgaattttcttagctttgaagtagctaatgggacagtgtgtgtatatgtgtgtgtgcccacttgcatataattccgaatyacttgtttatgtgtagtatatgattctatgacaaagagctccctttaatgcaaatrtaaggcattcatgagcatctcatgtataagctcatattttgaactttgtttttcttttactcaaagaatttacaaaatcattttgtggtttgaaaagtaattcagatttcctataaaatgttatataaaattttaaatttagattttagctagcaagtattggcttaactgtagaaagaacttcattttctaggaccattcaatagtctagcttctgctttatgacaatctactcgtgttttttaaaggataataatattaaaacatttttataaatctcacaataatgctttatgtatattaactcatttggtccccacaataaccctgatggatgtcattattattatcctcgttttttttttttgagacagagtttcactcttcttgcctaagttggagtgcagtggcaccatctcggctcactgcaatctctgcctcctgggttcaagtgactctcctgcctcagcctcccgagtagctgggattacaggcgtgtgccaccacacctgtctaattttttgtatgtttagtagaaatggggtttcatcatgttatccaggctggtctcgaacccctgacctcaggtgatccactcgcctcagccttccaaagtgctgggattacaggcgtgagccactgcacccagcctattatcttcattttaaatatgaggaaactgagacacagagagagaatatacattaagatcagaaagctagaaagtctaggaactaagattcagaacaaaatcatctgattccactctctgtgctcttaaatacttcactagaataagtcttattttttataattgatacaactggtctaaatattaatgaagttttaagattcaatttacatatagcttctgtctctgtaagttaccagttattactacctaaaatacacttgkagtcaatagtaacattgaatattcctagattttattttwtaataccaaccagaataggaggcctcaaaayacctgtgatggaaaaaatgcagtgcctgagtgcatgcagctaagcctgatcactagaatacatttcatttatattttataagataccaaagacttcagaactacaaagagaactatagttgctgcaaccagaaacctattcacatatacgtacttttataaatcatgtgcatatgtgtgtgggtacctycatgtgtgtgcatatataaatacatctaaaagctgagaaccaccttagtctggggcattaaaattttagtaaacttttttgatgtatatgttgaataagttgcaaagttgaagtctgttccctgcctccatgtggcttacgtacacttgctaatgagaaaggagcttattacaaatattcatagatgtgatatatatgtgtacatgtgtgtatatatatgtgtgtgtatatatacatatatatgtgtgtgtatatatacatatatatatctttctccccctacacacacatacacacacccctttattcgctctcttttttttttttttttttttttttttagttggagtctcactcttgttacccaggctagartgcaatggtgcaatcttggctcactgcaacctctacctcccgggttcaagcgattcccctgcctcagcctcccaagtagctgggattactttctactatacaaattttactgtcatagacattggcttttgtacctccaaaatgtttgttattatccacggaaagggtacccacattttacttctatggataaattacacatatattgactgatagctactatttaatgaaactttttttgtgtttcagggtctcaactctatctttctatctatctacttatctacctacctatctatttttttctcaattaattccagaatgttaaatttcatgatggcaaaagtcattattaattttgttcactgacatactaagcacttaaaatgctgcctggcacatgtagagactcagaatatgctttcagaattgaatgaaaatatcttgacaaggtagcacagtttttgcttttgtttttgttttaatagagtcagggtattgctctgtcaccccacccaggctggagtgcagtggtatgatacagctgactgcagcctcgaactcctgggctcaagcratcctcctgcctcggcctcctgagtagccagtaccacaggtgtgtgccaccacgcccagctaagtttttattttttgtattttttttgtttttttgagatagggtcttcctcagtcttcaggtacaatctcagctcactgcaacctcaacctcctgggctcaagtaatcctcctgcctcagcctcccaagtagctaggaccacagacacacaccaccacacccagctaatttttaaaaaattatttttagtagaaatgaggtctcactattttgcccaggctggtctcaaactcctgtgttcaagtggtcctcccgcctcagcctcccaaagtactaggattacaggtgtgagctaccacacccagcctaatattttattttttgtagacacagggtccccttatgttgcccaggctggtctcaaactcctgtgttcaagtggtcctcccgcctcagcctcccaaaaggttgggattacaggtgygacccactgtgtcagcctctcattgttttccatctgacaggtgagaaactgaacctcagagagcatggattactgacccagtatcacagctagtgcagtgcagaagcaggagtggaacctccatttggctccactggccagactccctatctgtgactctgtctccaagaagctcttcgaggccagacagcagcatcttctggggtcttttaggtcacaagtatccctggtcttttcatgactacacatttctggctgactttagagctctagatgtttttctcctatgttgatctaccccgtaaggctccatgagaggcttggactattgtttcacagtaggcttcctaagacattttgcttagctccttgaaggcttccacctgctcttgagcttagraggagaatatggcctagtcaaagagagaagagcataatagcagataggagtaagtgagcaggaaacacagagaaatggtgaagaggaggaaagaatggccaatagaagatggaaaggcagcagtcacggtcacaaaaaaagggtccagaaacaatacaggagatgcacaagagatttcattgcttttaagaagtgttatgctaaaatatcttcctctatagggaaaagacaatggcaaagaacttttaaaatttttatttggctacttctatttaagtattaagtatatcgcggtgtacaataaatgtttacttaacaaaatacataaaactctttcctgggctaaaccttgaaagacagtcatacatatttcataagttttttgttgtaaaatatttgatgatttcgcagttagggggtttcttagaaagtgctatacataatcagatataacctttccattttatatttccttgtgtaagcaccatgacttctagtaatcttgagtgtctccccttttcaattcacttaggaattttgcatttaaactattgcccttgtttagggagaacaaaacaacacatccaaaaaaatgaccaaatgtgtacaacctggtattacatttctgatttacataatttccacctcagaaaagttttcttaaatacaaaactcactcactttattttaatgcccgaaagaatagcccagataaatggactccaaatttgaggcctgagtaataatgcattttaggattagactagtcatccttgctattttcgtggtgttcatcacgtacagagtacaacaagatactctattatcccttcaggctgttggataaatacaaataagcacatacaaccaaaacaaatcattgtatctgtgaattgaaatgcatgtcataagaactttaatctggtgcaattgctcttatagccaagtaaatatagtcagcaaagcttaccttttatgttaagcattttacagattacatatgtaagataaatttaagatttgtgtttaaatgacttttaaaagtaaaaaaagcattgggaagacttcttactcagaggttgtggtcagtcattttcaaataatttttcattgccaacatctcatacataaacttatataagcttctacaacccctcccagagtcagccttctctcttctttcagtaacatcctrtgttgccatctgactgaactgcaccatttgtcaccagttccaacacatcttgtcaacataccttttctattggaagaaaaaaagaaaatgggcttgaataaaaacatgtaaataaatgatgagcactttgctcttttggttgaattaaacagtgttgaaaggtgttagctagagaagacttaatagaaagtataacattttaaataatgtttaaggggaaaaagaaaaagayattttaggtttcagaataaataaaagataaaaataaataataaaagattttaagtattagggatgacttgcaaaatctcagaggtaaaggtaagaaacactagacagaaaataattttatttgaatttaaaaaatgggagagaatccacagaccctttgagggaactggatcatctttgcagactccctgagatgtcgaaaaactgtgagtctgcttgctttctcaatggggatgctcatggtatggggcaatttctcagccctgatcatctgctgcctggaaatagactcagtgctgttggtaggggatggtgggagtgagaccggcctttaggactgcaggctgcatgggagtggggtgaggcctgtgattgctggctttcccccacttctctggtatcctgtatgactcaacagtggcagccataatccccctgggaatacaacttcattagactgggaaccacatccccatcccccacagcagccacagcaagccctgccaaaagagaggctgaactcagacacacctatccctgcctccacctggtggtctttctctatcagccctggtagctgaagacaaagttcataatctcttgggaggtctatggccctgtccactgcctaagaaaccttaatactcaaccagatgtccctagggcaagtttgcaacctgtctataggaccacagctgatgcactcttgaaaatgacacctcctggctggaggctaaaccaaaaccagtgcattaaacaaaaacacaaccaaggacctcacagagtccacttcactcccctgctacctccaccagagtaggtactagtatgcacagctgcaagacctgaagagggatcgcatcataggactctgcagatattccccagtacaagcccagagcccagtagctccactgggtggctagacccagaagagcaaaaacaatccctacaattcatctctcagaaagccccattcctaggagaagggggagaacaccacatcaagggggcacctcatgggacaaaagaatctgaacagcagttcttgaatcccagatcttccctctgacatagtctacctgaatgagatgggaccagaaaaacaattctggtagtatgacaaaataaggttrtttaacaccccccaaaaatcataccagctcaccagcaatggatccaaaccaagatgaaatctgaattgccagaaaaaagaaaaattggaaggttggttattaagctcatcaaggaggcaccagaaaaaggtgaagtccaacttaaagaagttgaaaacgtgatacaggatatgaaaggaaaaatcttcagtgaaataaagagcataaataaaaaacaattgcaacttctggaaatcaaggacacacttagagaaatgcaaaatgcactggaaagtctcagccatagaatcaaacaggcagaagaaagaacttctgagctcgaagacaaggcatttgaattaactcagtccatcaaagacaaagagaaaagaattttaaaaaaatgaacaaaggctccaagaagtttgggactatgttaaatgtcccaacctaagaataactagtgttccygaggaagaagagaaatctaaaagtttggaaagcatatttgagggaataattgaggaagatatccccggccttgctaaagatctagacattcaaatacaagaagctcaaagaacacctgggaaactcatcgcaaaaagatcattggcttggcacacagtcatcaggttatctaaagtcaagatgaaggaaagaatcttaagagctctgaggcaaaagcgtcaggtaacctatraagaaatatctatcaggttaacagatttctaagcagaaaccctacaagttagaagagattggggtcctattcttagcctctttaaacaaaacaattattagccaagaattttgtattcagcaaaactaagcttcgtaaatgaaggaaagatacagtgtctaccaggcacacaaatgatgagagaattcaccattaccaagccagcactacaagaactgctgaaaggagctctaaatcctgaaaccaatactcaaaatacaccaaaatagaacctccttaaagcataaatctcacagtacctatataataataacacaatgaaaaaaaaaaacccaacttattcaggcaacaaatagcatgatgaatagagtagtatctcacatctcaatactaacattgaatgtaaatagcctaaatgcacctcttaaaagatacagaatggcagaatgaataagcattcaccaaccaagttttcttctgtttttcaggagactcatctaacacataaggactcacatcaacttaagataaaggggtaaaaaagatattttatgcaaatgggcatcaaaagcaggaatagctattcttatatcagaataaacaaaatttacagcaacagcagtttaaaaagacaaatatgttcattatataatgttaaagggattagtctggcaggaaaataccgcaattctaaatatataagcacctaacactggagcacccaaatttataaaataatcactactagacctaagaaatgagatagacagcaacacaatagtagtgggggacttcagtactcccctgacagcactaaactggtcatcaagacagaaagtcaacaaactctagcctgcaacaaatgaacttaaaagatatttatagaacattctacccaacaactgcmgagtatacattctactcatcagcacatggaacattgtccaagatagaccatatgataggccacaaaacaagtctgagcaaatttaagaacattgaaattacatcaagtactctctcagactacagtggaataaaattgcaaatcaactcctaaaggcatccccaaaccatacaaatacatgcaaattaaataacttgctcctgaatgatcattgagtcaacaaggaaatcaagatggaaattaaaaaattatttaaactgagtgataatagtgacacagcctatcaaaaccactgagatacagcaaaaaatggtgctaaggggaaagttcatagcattaaatgtttacatcaaaaagtctgaaagagcacaaatagacaatctaaggtcacacttcatggaactagagaaaaaagaacaaaccaaactgaaacccggcagaagaaaagaaataacgaggatcagagcagaactaaatgaaattgaaacaaacaaaaacaatacagaaaataaataaaaagctgtttctttgaaaatgtgaatgaaattgatataccattagtgagattaaccaagaaaagaagagagaacatccaaataatcgtaattagaaatgaaatgggagatactacagccaataccataaaaatacaaaagattattcaaggctactatgaacacctttacacacataaactagaaaacctaggggagatggataaattcctggaaatatacaaccctcctaggttaaaccaggaagatatagaacctctcaacagaccaataacaacctgcaagattgaaatggtaataaaaaaattgccaacaacaaaaaaagtccaggaccagatggattcacagctgaattctatcagacattcaaagaagaattggtaccaatcctactgaaaatcttccaaatgatagagaaagaaggaatactctctaaatcaatctacaaagccagtatcaccctaatgccaaagccagagaaggacataacaaaaaacgaaaactacagtcagtatccctgatgaacatagatgcaaaaatcctcaataaaatcctagtgaattgaatccaacagtatatcaaaaagataatccaccatgatcaagtaggtttcacactagggatgcagggatggtttaacataggcaagtcaataaatgtgatacaccacttaaacagaattacaaccagaaatcacatgattgtctcaatagacacagaaaaaccatttgacaaaatccaatctccctttgtgactaaaaacctcagcaaaatctgcatagaagggtcataccttaaggtaataaaaaccatctatggcaagcccacagccaactttatactgaagaggraaaagtggaaagcattcccactaagaactggaacaaggatgcccactttcaccacttctattcaacatcgtaccaggaatcttagccagagcaatcagacaagacaaagaaattaagagcatccaaaatggtaaagaagacatcaaattgttgctgtttgcagatgatatgatggtatacctagaaaccctaaagtttccaccaaaaagctcctagaactggtaaatgaattcagcaaagtttcaggatacaaaattaatgtaaaaaattagtagctctgctatacactaacagcaaccaagctgagaatcaaatcaagaactcaacccctttcacaatatcagcaaaaaaataaaatacrtaggaatatacctaaacaaggatgtgaaagacctctacaaggaaaactacaaaacactgctgaaagaaatcatagacaacacaaacaaatggaaacacatcccatgctcatggatgggtgaattaatattgtgaaaatgaccatactgccaaaagcaatctacatattcaatgcaattcccttcaaaataccatcatcactcttcacataactagacaaaacaatcctaaaattcatatggaacaaaaaaagagcctgcatagacaaagcaagactaagccaaagaacaaatctgaaggcatcacattatctaacatsaaactatattataaggcaatagtcaccaaaacagcatggtactggtataaaaataggtgcatagaccaatggaacagaatagagaacccagaaataaacccaaatacttacagcccactgatattcaccaaagcaaacaaaaacaaagtggggaaaggacaccctattcaacaaatggtgctgagatcattggcaagccacatgtagaggaatgaaactggatcttcatctcttatcctatgcaaaaatcaactcaagatggatcatatacttaaatctaagatgtgaaaccataaagattttagaagataacatcagaaaaacccttctagacattgacttaggcaaagacttaaatgaccaagaacccaaaagtaaatgcaacaaaaacaaagagaaatagatgggaaytaatgaaactaaaaagtttctgcacagcaaaaaaaataatcagcagagttaacagacaatccacagagtaggagaaaatcttcacaatctatacatctgacaaaggactaatatccagaatctacaaagaattgaagcaaattagcaagataaagacaaacaatctcatcaaaaagtgggctaaagacatgaatagacaattctcaaaagaagacatacaaatggccaaaaagcatatggaaaaatgctcaacatcactaattatcagggaaatacaaatcaaaaccactatgtgataccaccttacttcctcaagaatgaccataataaaaagaaaaaaaaaaaaccaacaaaaaatagttgttggcgtggatgcaatgaaaagggaacacttttacactgttggtgggaatggactagtacaaccattatggaaactaaaagtagatctaccatttgatccagcaatcccactactaggtatctacccagaggaagtcattatacaaaaaagatacttgcacatacacctgtatagcagcacaattcactgttgcaaaaatatggaaccagcccaaatgcccatcaatcaaccagtggataaagaagatatgacaaaaatatttatatgtacacacacgccatggaatactacttagccataaaagcaacaaaataatgacatttgtagcaacctggatggaattggagattattattctaattgaagtaactcaggaatggaaaaccaaacgttgtatgttctcactcatatgtgggagctaagctatgaagatccaaaggcataagaatgatacattggacttcggggacttgcagggaaagtttggggactggcgaaggataagagaatattcactgggtacagtgtacactgctctggtgatggctgcaccaaaatttcagaaatcactactaaaaaacttactcatgtaaccaatcaccccctgttccccaaaaacctattgaaataaataaataaataaataaattgaatgaatgaaccaaaggtattgcacgaggaagcaacataaataaacttagtgagtgaaacagtgaagaaaggggcaatgtgatggtggtgataggtatacaggttaccttgttcacccttttaatactgtggataaacagaatcaagtaatttgttcagctaactagattccatgaaaatatgtagccatttttctggctaaatgtaagaagagggaatgaacaattgggttagaaccttcataaaaagacatccacagggaagctacaaagatttcttatggtccccaacaacaagttcgcatactgtgcctaccttgtttttctcacagtttgatttcaatcctctcacattttgtgaggtggctgtttataccaatctgtggcctaagatattcttatgactattacttgtttatcaaaatggtacacattcttcagttgcagctccacaggctttctggaactactgtaattaacattgatttctttatctctttccttatttgtcatgtatgattakcactacatagaatgacatttactttttctcctttttcttttatatgtgctaattctgtctctttagcctagtcagaagctctgagttcgcagaataaccatgaacacagaattaaaggtctagatagatcttgtctaaccctttcattttcaaagaaggaaagtttgtaaaatggaaactacagtgatattgagtgtatactatgtgtcagacagctttaacatttttgtatgaatcactcgtgttgtcatctcaaaggtcatatggaatacatactattattgtcatcattttacaaatgaaaagaacgatatgcagagaagtggcttgctgagggcacacagctagtaagagacagtgctgggattcaactctagaccttctggctctagctcttaactttccaagttagtgctgcaggtagaacaaaaactctgtctcataacttctttctccatttcagggctcttgcttgttctaactaatttgtaccaccataattcttatactagagcataataaaacaaaagagatgcaagtgtttattaacttcagccttgtatttcacagatcctaaacatgtaaacatacacctgatacactctcatcctttccgaagagagcaagtaataatgttatactgagtgattaatgaactgatgtaaggactcagtaatccgcatgcaattagtggatcaacaaagcaatttacgcagtaggtatgtattttgaatagtattctttctgtagggaaccagctgtatgtagtgtttaattgaatgcttttgcatcacagagtgatttggagtcaaatcatcarccgcatttcccaatgtgtcaagtagacagttaacttatcaaaacttccgtagtactcagttctcttccaatgtgctccttatcttgaattcttttgaaatagtgtgccttataattttccaggaatgatttacatgtattcctgttcagagacagagggatggattacataacattccctgaggccctttttgccttcgagtaaatgctctttatcattctaagcttcttactctgagtaatatttgaacatgaccctgtggattccccataacaatttctgatactgtttccctagttgatatgtttggatattttccatactatgcaggctgaattctctttttaacttagtatgttctttttcactctgatgctttgacttttgccatcatagttttctttattttcagagtttatcgactgtcactaggctttcttctgagtcctttcgccaagtcatccatactttgctcttctaatcttctgttataacaggcttcctgttacttatatttttgctgttatactctgaatttgttccagattttctggtagagatttccctacaccaaaaacagtattccaggtgcagccacttgagaattgagtagagataaatatgtgcgcccctttttactgtgatgtcttgccatctgcagttcggagcctgtaaaagttagatttgggattgaaaataagacttccactaggactgccatttgcagcacaaactcacctggatggtaactgctgtctagccgcagctccctttcgacaggtccttctcagaagacttcttttccaggcttttttcttcctgtgcatatctgtgttttcattcattttcccctggtgaataagctggccctttcccaacctgactctcatcttgttatttgatcccaagatctgtaactcctctcagaccatctgcattatttctctgtccttgctgatgttttgcaacattctccagctgactatcatctgcagatttcattagcacaccatttactatgttctgaagatcattaatraagatgaataaacagaagagaagaccttctgcagacatctgtggaatttctctgggctgcccccacaactcgatcgccattgttttattttacctttttggttttttgcctagtgtttcattcacttccctccataagcaccctgttgtcatatctgagtaactgcactcataatgtgtgattttcttgcacagctttataattgcctaaacaattcatcatttgtctgacagcatttttcctttattaaatcccagttttattgacagttttcattatcttctagattgcagaagctatatgtaacaatgtgtgtgcccattctgatttctcctcaatttattactgttttaaaacctgtactatagatgataggaagagagtacgatgagaagagatagactcagaatctctatggctcttcttggaaaaacaccataatgtgtatggaagatcatgcatggggattttcctgcaaggcgctaacagtgaactttctatccaaaaagatagaaagaagttgtctctggttttgaacaatgaagatttatatctaacttatattgaaaaatcaaaggattagattttttaaactgaataagaaccatagctgtacttagagaatatctgtgatgcacttggcactgtgataagatgtgatgtatatcactatgattacaccaaccctgaatggcacttattttcaggtgtgacactagcctatggcggctgtcatgagrattagaaaatggtgtcccctccaggaggatactgcctgtgcctgagaatagagcacaggctgcatctaaggacccactgaccttctaggccagatatctttgtgtgtggcagagcctgcctaaatgtacatggaagccacgatttctttgtcatttaaatgaagaggataagatacctataaaagatagatttgagattgatactaatgtggttcctccatgccatattgtttctctgcacatagaacaaatatggatctaactcatacttctgtgattgcctactaaattcaaacagtactttgtgtttttacttagaaaagaatggatatggccgggcgcggtggctcacgcctgtaatcccagccctttgggaggccgaggcgggtggatcatgaggtcaggagatcgagaccatcctggctaacaaggtgaaaccccgtctctactaaaaatacaaaaaattagccgggcgcggtggcaggcgcctgtagtcccagctactcgggaggctgaggcaggagaatggcgtgaacctgggaagcggagcttgcagtgagctgagattgcgccactgcagtccgcagtccggcctgggcgacagagtgagactccgtctcaaaaaaaaaaaaaaaaaaaaaaaaagaatggatataatttaatatgtaaccttctcttccaatctttagctatgctgttgattttcttcccagtcttcagctatgttgtttttgttattgtcattattattattattatttattactgaatctagaaagaatcatggagaagaagcagtattactctgggccaggtattctttgtaatatctttaaaatacatttgaacgctgttcacatatccctttgtttgcctattagatccggtcaacattatgcaaacacacaccttcatgatattgaatattgatcaatttagtcacatgccatgcaaacgtagaaataccacttaatggctgggcatggtggctcatgcctgtaatcccagcattttaggaggccaaggcaggtggatcgtctgagctcaagagttcaagaccacccagggcaacatggtgaaaccccgtctctagtaaaaatacaaaaaaattaactgggtgtggtggtgcattcctgtagtcccagctacttgggatgctgaggcaggagaatcacttgagcccaagaggcaaagttgcagtgagccaagatcatgccactgcgctccagcttgggctacagagtgagactccatctcaaaaaaaaaaaaaaaaaaaaaaaaaaaaaactactacttatcaaggaatgttttgaatgctttaattctttgacttaaattactatatwtatttataaaggtgtagaagatttracaactggaatgtgtgtgtgcgcatgcacatatacacacatatgcacatatgtatatatgtgtatgtataacatatatatctataaataaaagttatttaccaaagcatcatatattttcattttcttttctttccttttgttagcattttcatttttcttgagtactgtttttattgaaatgcaccttgcactttagctatagagcttttccttgttgaacaatgtagttttcttgctcaacaactctgacatccaggtaaatggaaggaaaatggataggggagttgtgtgttcataatgccactttgccaccctgaaatctatgcagataatctacttggaaggctttgagccccagtggaatacagaaccatgtaagtatcctgcattgatttacagcacctgctacagctgcttggatcttggcaggcattttctctcctgccaaatgctgttgaaattgctgggctggtctagatggaggttatatttactggacatgtttataatcttcagagtgatctaagccatagagagctaatttcccaaagatcaatgactaagggaggatttcagaggttatcctctttatccaatttcctgtgtcctaatgagatggctgaaacctgtttggaatctttctgattaggaactcttgtgagagtcaataaagaatatgacattcataaatctaaataagaggcgacttggcagcctgtatggtgattcatgccacgagaagcctttcccctgcccccaacaggatgtgccatgggtggccaacctgagacaaggtcagacttgaaccaagagtcttgagaggacttggcctctcctggttaattcagaggactcttctggctattagaatgcgctgtgtatattttttacctgtcttgatttaattcaattcaattgccattcaattcaaacgaaatgtatttgttaaatgattattatgttttccaattaagaaggatgacacaaaaaaactatattggtatatggtaaggatcattatatagatctaaaaaagttttatcaaagatgatgataatcataatagctaatgtattttgagtagttactatgtcaggcagtgtgctaagcacttcacacatgttatttaatcctaacaaattcatgaattaggtcttattatacctattttgcagatgaagaaactgtgacttagatgcattaattaactttccatgttaacaaaatccttcccaaatcccatattcccctctcgctgtcttttgccccctctcagctaatcttctaggaaaaacttgtctgcctttatcatctctacttctttacctcccatttgtttctcaacccattgagttaggcttctgccactgccatcaaaatgaaaattaaacagggtcatcaattcctccacatgtccaatacagtatttttgtttcactggattgctcaccaccttttcccacaattaaccacttccttctggaaacagtatcttctcttggtttcttgtaccacatattcctgtgtttcctctggaatcatgagctgcttatctccatttgatagcacctcttcctctgcctaatttctcattactggagcattttagtttcggttctgggtcatcttctcttgcccctggattctgccctgtgtaggggattttaaacattgttggtaccacgtacattattggcagtctcatgaagcctatagactcggagtgcataaaataccctggatatctctcagtatcccaaacgtagttcttacaaatgggaactcttgttttccatctgcaaatttgtttttcctccagtcttgtccatcatcaatccagttgctcaagaaaactagaagtcatctatgattcctcatttatcctaaaacacaaagcttataccatccattagcatgtcttggctattttatcttcccaccgttccagattttcccactttttccttctatccactgccaccctgctgtgaccccttaggtggtgcttaatacatgtttagtgtatgaagaaaggtttggaatggggaaaataaagagacacactgaatcactaggggacatgtaatactctaggcaagacccaagatagaacagggacagtctgaactgaagacaagaaggatgaatttaaaagataagtgtgtccagtggaaaatacagacaaagaattaagagttacaaatgcctgttagtgtaatcgggttgtttgaagctatcttttaaaaatttccatttctttttaagtagccttttacctcatgttctgtgaagtcttttggagacagtaaatcatattgtttgggaaatttaagggtggagatgggaataaaactgaaaagaggaatctttcctagattaagttgacaaagaaacagctttcttcagccatttctctccagacactagtcaaacaaacaggtgagcaccagatagtttgagcagcagctggaacagttcaataagagtctccctctagcctctccttacttctgaataagcaaagttaagctacagtcaactagtcggcttctctaatattctgtattgttctgaggtttaaggctttgtttttttcttggctgtctaggctctctgattaactgagattaatctctatcatcctgtgtaagctaaaccctaaatyacataatatgttttctatctgtatgccatatgccttccatgtcagggatgactccagagacaacaaaagcaagctgtgtttttactgattttgcaaacttgcattcatcagccttgggcattttggcctccccagtgtcagtatggtgttttaatagctgagaaaaacaacagaaatataaagagaggacactgtgaaaatcactttccaaactgacttgtattgaaactgcctcacatctaagtaatggaaaataacagtgattaggataatgcggtgcattacattcggtgacagttaatcctcttattaacttcatggtcatatttcgctcatttgttaggttggaaggactgtgtgagaatrttgtagttcctgtttttctgttcattgggaaagttgggaaaatagttctaaaaataaaagagttccaggttgaaaagcctttgaggttgactgttctctctggagatgcatgtttaccttgtgccctttatccatgctttgagtttgggtacccactctttgaggcctcattctcttccctttagaggattttctttccacctgagcaatcaccagtgagggaaaagtcagtggggtggttcagctgcrtgatatgttgcattgacaaatggaggcagagccctgctccagccccgtgagttggaacaacctacaaagcatttctggcagtgagccaaagaggtgatccctcctctagggaaaaaaaaagtcaatggctgagattgcagttctccatccccttgctgggctgattcatacagcagcattgacactgaggtctcagaagaactgttctcttcccagtccatctaaaaatatctaaattcagatttataatgtcaggagctgataaatttgctgaggaaatgcaagcagtgtcactgccrtgctaggaaatctattctgatgaattgatgagggaaagaaattccaaacatagcagagtctcagagtgccacttcccctgggatggtgagcaaaatgagcatgttttccttgccatcgaagttcccttcttcaaacatagtagaaagtagaatatactagattgaaaaggaatatggaaaatacctttttgatcaaaagcatgacatgacataaaactaaatcttatggcctgtaaaatattcttggtttacgtcaagcaaggggttcccttttaaaatgctctttcactaagacaaaaattccactcacatagccctggtgacttttgattgaatcaggatcttttaaatttggaactcagcaagaaaccgactgtcttactttcctacaggttttgtttgaactttcagaatctaagttgatattgcggtctgctgctaaccagctcttycctctctttagttggtcagtggattctcaggagtattataggatgtttcctccataccacctggcttgaaatgatttggcataggcttcaactctaatttattcagcatccctttagcgcctactagaaaccaagtatcatgactggaacttttctgaaatgatgaaggtgccatggggacagatgggcgtgtaaagaacttattacaaatcaaatcataacataataattgatactgaacaattgctatgagaattgaacagaggaaatgcttctgctgggaaaagaccaagaaggcatcagagaagaagtaaaatttgtggttggggtgatacaatgaatgagtactagcaatttctcaggggagcagagtatgtctaacaggcagaacagcatggcactaagttaggaaaagtaccacctgccttagggacttcaacaagatatttgaagtgtttaaataatttttttttctcacttggattttggcttttgccaaacaactaacaaacaactgttacatttgatctaattattttagatcattaactttgaaaattgctgtttgtgtgatttcctaccttggccttgggcctattatgagctgacatctaatgaacaggtggctggtacattcctggagttttgcccttgtcaaacacttgacccagaccgcaaaatgtcatggtagctttccctgctgaaaccttgtggacttacagctcagtaacgatgttctaatgatctaacatgctatgccatcatttgttgattcataaagtcatgagataaacactaacattattatcactgtctccttgaatgaaaattaaaggctagacttttaattttatgcagtattttcttgactcaattatttgcattaaaaaatgtttaggcatttcattctcatggacctacctcttaatatgctttcttcttaatcaggcaataatttgtaggtttgggcctcaatttcaatagcaagtgagccccaaactcagtaaaaagcaaaaagggttttttttttctgagattcaatatgaaacacagcatacaaatatttcatgtaattttaaaaggtaatttagcatagatatgcatactgaagtatttaggggaagtagaaagatgtctgcaatttattttgaaatgcgtcaacaaatatgacggatggatagagggatagataaatgggtggatatgtttgaaagcaaatataataaaaatgttaccatctgagtataaaatacagctattgattataaaattattttaactttgtggaatgtttgaaatttttacaatatgtttggggagaatgataaggtagcaaagaattaaactggtagaggtgcttggataagaatgatgagatacttaaagtgaagagaaatttctctgacttatcaaaatgtagacacgaatgtagttgtgtctgtgagtcaaagtacacaatctctcttctccattagcttatgaatctgtcagatgagaaaaaagatcatcctaggagaaagagtagttcactgtaaaggccagaactttagtctacttggcaatatataaatagacttttggggtttatttttaatataaaacactgatatttttcgcaaataaggccatttctgccttctcagtcatttcaacatatattgagcacttcctatattcctggcatggtgctaagcacgggggctttaacttcaaaaagttgaacatcaagaatggagaaagagaacaagaaggtgatgtcacacacggaaagaaggacttaaaatgtgctgtgagagctctgaagagggagaagtccctggcttgttagctctgatttggggcaggctactaaacctttttgtgccttagtattttcctctataaaatctggccaataataaatgttaaactactgtctgttaaatagctggaccttcataaatggtcactaatatctttaacccagagaggaagatcaaattaggaaaaaaaaataacacagccataaaatttgtttgacagacatccttctttttcccatccctcctctataccccatcttttgttgccctagtagaatgataaaatcacagccctggagctggaacagacctagccctagattttggacagatattccattccaacccccatttagaggtgaagacactgaaataacttgagaaaagtgacttgtctcaggtcccatagctagtcaatggcaaagtgggtgaacatgtaggataataaagcttttactggagagagaggttgaagaaaagttctttggaaatatagtttatgatttcttaggatgtaagagagaaaatgctcagaaactttttttattgttagaagagaatgtgttttagtgtacctaaacacattgcattagtaggttctcaagaggcatttgttgacttgtattgcattaaacctctcctgctaattgtctgtatagcatggttaacccttgttatgtgggtaactgttcctttaattaaattagtttttaagtcttttagttatattttggtgcctataattgacagaatctatatctcttaaccccacatagatttatgcagttaggggtagtgaagattgcttctctctttgtgaaaatggaatgagtactcttgtaacatctctatatttgtatcttatttgatctgtgggacatagaacattttcttgacaagatagcgatttcccctagagatctgtcaattcacaactttgaattaaggtctctaggcgttctaattatcagagccaatgacccccgctggctttgacctccaatactttagctggacagttcactcagagcaaagatagaggttctttatactaaaggagaatatttcttatcacagaggagggaaagaaggagaataagagaaatagagggagtggaggggatgagagaagggaaagagaaagagagtaagtgagatgtcactgcaaaatgtttttaaattatttagttgatactattaggttggtgtaaaaatagttgtgcttttttccattaaatagtaatggcattattaaaattggcattattaaaagtaatggcaaaatggcaattacttttgcaccaacctaatattaaattttttaaaaataaaagtcatataagagactaagcaaatccacaataaaataaataagttgaaaattagtgaatgaaataggatctccacaaacaatgctgcagaatagtttagaaacactgaaagatatttctaacatgcaatacagatcctttcatgcttcatttgagaagctggtataaatagaaaagtgaatgtacagtctcagaatctcagaccagaaaacattctagagcacaagttctaagacaaaagaaagagaggactcacactctacttgggaatgggctgatttttgctccattgagcagattgcactgttgattaacaaggtagatctggtaagaagttgagacagagacaccacatgctgaagaatctaggctgtcggtgctttttggaatctcagaaagaggtcagggagcccttgtgactccaggaggtaaatgactttcccattgtttgctgttccttcccagcctcaaaaagtagggatgcagacagctgcttctgagggtgattttttttaaatttaaaagttccacctgggcatgatgcagttgctcatggctgtaatcccagcactttgggaggctgaagcacatggatccttgagcccaggagttcgagaccatcctgggcaacatagtgagaccctgtccctacttcaaaaaaaagaaaaaatcagcctggcatggtagtgtctgcctgtagtcccagctaccagggaggctgaggtgtaaggacaactttaatctgggagatcaaggctgcagtgagccatgatcatagcactccactccatcccaggttacagagtgagaacctgtctcaaaaaaaaaaaaaacaaaaaaacaaaaaaacaaaaaacaaaccttggaaaagtctatagcttcatcttatgcattattcccccatatactgataaaattcaagtcccttcatagaacccaaacagctgataatgtggcccataattgtgaattccccaagcccagcatttgaaaagacaatttaaaaaatgagagagaaagagagtcagtgctgataagtatgaggtaatgtgaatgtgtaggcacagggtgactttgtaagtgggaagaaaaggagggagaagctaactttcattaagagtcttctaggttgggtgcggtaaatcacagcactttgggaggccgaggtgggcagatcacaaggtcaggagatcgagaccatcccggctaacatggtgaaaccccatctctactaaaaaaatacaaaaaaaatagccaggcattgtggcgggtgcccccctgtagtcccagctactcgagaagctgaggcaggggaatggtgtgaacccaggaggcggagcttgcagtgagccgagatcgcgccactgcactccagtctgggcgataaagcgagactccgtctcaaaaaaaaaaagtattctgtgagccaagcgctgtacttgattacttgatttaatcctcgcaattatttttcatataacatgatgagaagatgggggtccttgtaagcagcagaactgggatttgaacccaaatctctatgacataggtccccatacattttctatgacattggttgtgtgccatctggctcatgactttccagcaatttcagggataaaagatgtataataatctgacattcaaaacccatatacttttgcctgtgttagctgctctgggtaaaactattggataaatgaggtttggagaatagatgtgaattttcattattcattcccttctgagaattgtccaaataatattatttctaccagggtgaaatagagggggaaaaaaaacccctaggtttctggaaatattgactatgggatataaggcaaatttagatgttaaaagtgatagttgccaaatttgtcaaatgccgtaatgttctcatgtacaaaaaaagttggggaatttttgtcagaaaattatgagttttgcactggccaattcaaatcaaagagtttttttttttttttcttgtctttggcaggttttacaagggggtgtccctgaggggaggtgaaatgagacctagaagcaatttttactgtaacacacacatacccatgcactaacttgctttcatatagttacctgtacatgccacatttcatgattaaaatgcagtccagaaaaatatggtgcactgggctatgtatgagtcccattctctttctttctatttttaagtggattttatgttgcctatttagtctgtaatgaccataagccactccagccaacttgttttaaagctcagagagaagtaggtcactaaacaatagaataataatgtggccacatatttaactttctagtacccacatttccaaaaagtaatttcatccaaaactatcatttcaacatgtcattaatgtaaaacactgttaatgagatattttgaattttttagtggtaggtcttcaaaatctggtgtaaatttgcactgacagcccatcacaattcagtcaagcccacatttcaagtgctcagtaaacacatttgtctagtggctcctgtattggatggcacaggtgtagactaggaaagcattcactcatggtgtttattcaatattttctctatcttctatcatttcttatattaagttgtagagagagagcgcactatttctaccccatcagagaacatgaagggatgcagagaagaatatgttgagttgactacctacctcacagaggacctctgcatgacatttagttgaagggaactgccttctctttttccaggaagattaaatctttatcctctctgccattcagtttaatacctatgtgcaaggcatcagtagagaccagatagatagatagatagatagatagatagatagatagatagatagatagacagacagatagataggcagagatgtttgtgtgtgtgtttgtgtgtgtgttgtgtgtttgtatctctaagtacatgaagaattggcatacatcccagaacacaacagactgaaactcctgattaaagataacaggtaaatggaatggacatccaataaaaacctgtttgtgtttttaaacaaaattaaaagactaaaataagaatagaatataggaataggaagaaagccctacatgacaataatcaatttgggtaccattttgttacctcctggccttctgcaacttaaagggaaaaaaaaattaccaccatcaggcaaatgccttatcatgataggacaaaattcttcccattgtatggctctgttggcatttttaaatgtgtcatatgtggctgggttgtggggtacaagatgtagacttgcttaggagacaaagaccagcataaacttttgaggatccatcctacatggagaatgtagtgaatatgctattgctctaagtggagacagagtcttgcatggcaggaagcttcctaaggtgaccacttgagtcatgaggcttagaagtctttgcagaagagggaaatgagccttcacattaggaaaatatgctttactattacataagttctgggatcaactgatacaaaagttgggagaaatcaaaattttaagtttttcctatgtgtgtacctatgatacaatcaagtttttattcaatttataactcctgaattcattcatcaggagtcctttaggaagctaaacagaactggcaggtctgtcatttggatttgtcatgattgtgagtatttcgttccctgcaattaaaaacgtctgtgggacaacaggatttcaagtcaggagattgttgggtccttgcttctgctacttagctaatctgtgactttggaaatcactctctgaatgtcattttgtttacatctattaaatgtaagctctctctgatagcattatgatgaggaaaaaatgaaagcatgtgtctgaagtatctggtacagaggccagcacatactggttgctcaataaataccagtttctttcccttttactactctaacaatttctcgtttgtattttctgctcctgagctctgtgtcttgaaaagttctgttggcatacacattggacttgattgcttacattaaaattatctattcttgtctctattttgtattaatgaatacaattaatctgattacaagtataaaactatcagtcaggtttctaaaaagttattaaaacatatatgtattacctgcttcccacattccagtgccaggctctgtagaaacaataatgaataatacagctattgccctaaagaggcttcaccaatcctgtctgtggttcagcatcaccaggcaataccaatttgtcatcatcatgctgaatggggagaggtttagaataatcacaggagaacgtaagaccagctcctggccccgtcttgatgggtcatgaaagaacaccgggtactatcctgagttgaaataattctagctcatagttaatctataaagccttatccagagaaattggagattatctttaagcattttgaaatattaagcatagcctgctggccccaaatgacattttttttaatatttacaaattattaataaaactaaaaatttccatcccttccctggaaccccaagcaaccaccgattatttattatttatttatttatttatttatttatttatttatttatttattcattatagagatggagtctcactatgctgcccaggccggtcttgaagtcctggccccaagtgatccctccgcctcagcctcccaaaatgctgaggccacaggcacggatgcagagtttgcagatgggcagctaccattttcgagtatgcagtaactgagttttgtgagaagagcaaagtggaaagggagaatgacttaattaggtctgtcctttagaaacaggtctgcaaaggcagtgttgcaaactaatccaagtgaaaaatcatgggagacttaaatgaaagcattcctgggaatgaagaaggcagatttagtaggattactaatgacaggttggatggaagatacaaaagagaagaaatctatattgctgtgatccattaagtctcattgtctacttttaacacttaatggggtggcagtgttgttattctaggctatcctttatgaggttggggttcttccctgacagttgctgaggctgtgggaacaaacgagttcatatagggagtgagtgaggaggaagacttcagacgctcagggattctacaccatggaggaggctacgaaggagatccattttcttctaaatcattctgataggcttctggatggctttcggtctctggccagctgctgatggaaagctctcctctctgatgaagattaatcatcaaacccaggagataattttattctgctcttctgagtcatgttagattccagaacaattaactttattttccccaaatcttgtatctcttgggaatcttccagtaactttggtttccagtctacggagctacttttggcagcttgttgtcaaagaagtgataattcttaaagcttagagtgctaaactgcaactcagttgagaattgaaaccttttcagtaaggggctcagccccagacacctgggactcctctttctcctttcaccctcaggtacaggagtgttacataaaatggcactaatccacttttacagtttttgtgttattaagcaatacattaagatttaataaccataacaaaagggttgttttctcaccaagcagttattatttgttgtacttctatttctactcatttaccttaggtttgctttagcgatttcaatttagtaggtgtctaatgatatgcctgtcaatgaaactttagagatgactttcagtccttggaatttttttttcatagtttcaagaagcaagacttgcgaagatgatttgcgttaagaggtttgtgtgagttgagtgtggacttaaattaaaagtaacttaatttactcagagtagtagaatctagtgcatttaaattggttgagaggtgcagacttcgctttggaagtcactgtaaatcgatgccgatagagtaaaaagcattctctgttctcttgctgttcctttttgaagggttcagaaggttggaagagcatccaaatcagtataatcagacctattagatcctagcaaagaattttaaatacatacatctttttgcatattgattctggcaatttaaccctcagcttaaaagcagaaagttggttcaagtgaatacaacatctcactctgcacaatattaagaaatagatctactgaaactaataaaagaattccattgttgtctcctccatttaaaaaaattctacctgaaatacttgttagaatttttataaaagtagtatctcatttatgtacaaaatagtttgtgtaaactataagtagacaaagatgtagggttgtatcacttctttgataagatactgatcttgtatttttamccaatgctaggcttaataaaagggtcctgtaaaatttactatgaaatctgtatgcctccctccaacttcttttccaactgagattggagtatggcaaaggaaatgaagcatgaagggaaaactaggagctatgataatctaagattcataaacaattataacattatttgctcacttttgattgtgcaaatgactaaatcttttaatgaagcataatgacccatctgacacatatataacaacacataataaaagataaaattaaatttgtcaaagcaatatagaccacccactactagtagattatgtttgggtttggattttcatatattttatccatatctgtttccttctattgggactttatggaggcattactcatgaactttggcagatcttttttggtgtgtctgaaagaaaatcccaaagctggttactaagatgtttgaaagtcatattcttcttcaaaccgtgtagaaataactatcaggaaataagtggttataattttaaaatggcatgtttagggaagagaatatataagtttgaaaaaccgcagtctcctccaatacatttctacctattactaacagggtcaaaattgtctacagaaaacaacctgatctcaatttcctcagacaattcagctagtaaaatggtgtgactgacctagagttacggagataactcctactgctgagctctctcaacaagtgacaccctggttgacaaacaatcacacattatttattaaacttctatttaataacaggagttatggagttagcaatgttaagtgaagagtccttgttttcaaactttgcaaattacagttagtaactaataaactaattaatgtcctttatgaagagatgctcagtgatggcctgaaaaatccctaaaggagatagggagagaattgaagtatggaataaaatgacctatatgggaccttcaaacttggagttttctatattttcaaaaattacttttgctgtcatttaatgtccaaatccaatcccttgtctagggaaccagttcagattaaacaaaatttcaaaaatacacaagcaatcaatatctaattcatttaagtcctgtttcttcccaggactgctgggtataagcctagagttgcctgccatttctcttatattcaaacactttgggaaaggagccatttttttagatctattttctccctgaagcttgggagctatatctatataaaatgagatgacatactagggctagcgtactaaaaccttttctaagagaatcaatatagctttgagaagcctcatttatatttaaaggagaaaagagacataagtagaagtggacataacgtatcatgtagacattgaaaaataccagaaatgatttaaaagtgactgcgtgttctcatattcccagtgccttgtaatttgacttggagggatgttctagatctccattgaatgtgctcactgagatttgtctttgtcgtattgattacaatcatctgtcaatgccctcaatattttctgtactgaccaacagcgacacagatcataggctgtaactagtacaggctgtgccaatgaaacaatagggctaattagcagacatgaaaatgaatcactgatttaattttcctcctggtctaatcaacacaatgtgtcagctaaatattttgatccattatttcaagtgaatagaatgtgcttttatattatcatttcaatttcattaccttgaatattggaatttttgatttttggatacatcagtgtccagtcagtatccagtgatttttagatacattttggatacatcagccttagcatacatcagtgcctacgggtataaggcactgatatgttaataaacatattaacagtttgtaagccaatgaaacctataattattgcataatttaaattaacttgtgtacaaaatgccataatatttccacatacgtggtggctttcaaaatcaaaataaggtgagcctatttcaatttatgacagacaattgtatatctcctctcttttctttgccaaagaagccctttatttcatcctcacaggtgttatacttgtctcctttctgcttggtgaaacaatcacggtttgtaatttcactttctgaccatcaaatacgataaaatgaaacagtttgtgcttttcttgtactttccgctatcaggggttactggttgagagagctcagcagtaggagttatctccgtaactctaggtcagtcatgccattttaataggtgaattgtctgaggaaattgagatcaggctgttttctgtaggcaagtttgatcctgttggtaacaggtagaaaatgtattggaggagactgaggtttttcaaacctacatattctcttccctaaacatgccactggctggctgggatgctaccttataaatgtgaggtagatgacaccagtctgtaactctagacttctgtcatggatagcaggataacttagactgagagctgtctgtcttcccagcccacatggccacaggatcagagcaggtcatggtgaagcagaggagaaacagctgcaaagcagagaagaaagtccaatagggtaggatgtgatgaataatgttgtgaaacagacagctagtgccagtaaggctcctatatcatagaagtctaggaagatacaagcaagtgctgtcatagacagataaatgaagtggacaytgttttgagacaaaagcaagctggcaatatcagagaagcttactataaagagcaaaatgctgggtgcactggctcatgcctgtaattccagcagtttgggaggccaaggcaggaagattacttgagctcaggagttctagaccagcctggtgagacctttatctctacaaaaataaaattaaaaactacctgggcatgatggtgcaggcctgtagtcccagctacttgggaggctgaggcaggaggatcgattgagcctgggaggtctaggctgcagtgagccatgacagcaccactgagccttggtgacagagcaagaccctgtatcaaaaacaataacaaaacacagcaaggaccctattactctcaatgggaaaaatcgcagttgcttttgggccagcctaataataacttgacagagagaattttattccctgcaagctacgagttcgttttctttaacagatgaggtaactgagccacataaaaattaagttacttgtctagagacacccagctgataagtaagagagcagacatttctactcaagcaatctgactccaaagctcatggtgatgaagcaggtcatgaaagctctctttatgacacatttgaataaagcagcatgacagtgggacaaaaagtacacaagacaaaagctccatcgttagggccaaagcataggaacaaactcaggccagtgatggagcaacttcagctgagattttagccaagagcttgttaacatctttccagttcccagatagaattagtcctaaggaattacgaacattgtattccatggyatatatatatatactacattttctttatcctctaatcaactggtgatggacactgaggttggtttcatatacaagagcagatgtcttttatttttttttttttgagacagagtctcactctgtcacccaggctgaagtgcagtggtgtgatctcagctcacggcaatgtctgcctcctaggttcaagcgattctcctgcctcagcttcctgaatagctgggattacaggtgcacaccaccatacccaggtaatttttgtattttcagtagagatggagtttcaccatgttggccaggctggtcttgaattcccaacctcatgtgatccacccgccttggcctctcaaagtgctgggattacaggtgtgagccactgcacccagccagatgtcttttttaatatgatgatttattttcttttggataaatacccagtagtggtattgctaggtcaatggtagctctatttttagttccttgagatatcttcatactgttttctatacgggttgaaccaatccatattcccaacagtgtataaatgttctcttttctccacatcaacatctgttgttttttgactttttaataatagctattctgactggtataagaggtatctcatgtggctttaaattgcatttccatgaaaaagaatgaaatcaygtcctttgcagcaacatggatggagctgggaaccattatcctatgtgaaataattaagaagcagaaaatcaaatatctcatgtattcatttataagtgggagctaaacaatgagcacatatgcacataaagatggaaataatagatactggagacaacaaaaatggggagrgagagaaagctgaggattgaaagatgatctattggataaaatcttaattatttgagtgtatacggagagcccaatcttcaccattacacaatacacccatgtaacaaacatgcacatgtactccctgaaactaaaaaaaaaagaaacaagcattgtgaactgctggatccccaagaaaggcagatgaccataactaggaagaaaaggagaaaaaatgtgcaatgtcaagaaacatttttgtaacttatggtcaatcttgtgtttctgcaactcacctacatcttaccatgtagaaatttagggatacaaaccacaaagattctgagggcctaatcatctctcctagacttgcttttgcattctggagtaataatctggaaaagcaataagagtagggacatatttatgattattcttaaaactgtgtgtagaaaaatacaagaatatctactccaaaaacctgcatgaagacatttgatagttagccaaaattcaagagactcctaatctttgaaagctacacattaggctggtgtatatgtcccattatttgaaattgcacctttatatatttgagacatttatcctattatccctaattacaatttccccactacaattcactgcacagtgcttccttagggagctgcttaatacatttcaatcttagaaggtcaagattccctcagccaattccaaactgcattgtcccattgaatagatgtggcacattctggatctagtgagaataacctatgtatattactttgaagtaatacaggtaggccattatagcagaaagaagttgagtaaatgttgatatttaagaaggttcataaaatatttgaacacaactgcaatccatacccaattctcagtggttttttttatagaccatgaaatcatagctaaagtcaacttcggttctgccctaacggagagccacaaataaccctaaaccatagataactcaaatgcatttttacttggcttttgactgctttttatgataattttcacagcacattgctcttctaattatgttttgtttgggatcatattaaaattaacttgtatttagtgattatgtgctacctgatgagttaaagaggagccctgggagtgtattgaaaaaccaggctgtggatggccttcagtactttacacaaagaaaagccaaatagttaaaaaggcattaaaaatggaaaggatgtaactagtgggcaaatagctccaggacctcagttgcatgaacttagtatatctctttcctcctccttctcccctccctcctccacgccctctttctcctagtctctatttccccttttccttatcctcttcctccatcttttttattctttcttggaggcatggaaagcaactcaaaagaaaaggagacctctatagtacatccgcactcagccttggatagtgagaagtactcaggtctgagtagcctcagacagtggagtcagaagcaagatgaactgtcagggattataataggaatggtcagggctgaaagcaaggcaataggtcaaaacctggcaacaaggaaagagccctggataagtagtttccataaatccaagcaagacaatttgttaaggcttagcatgcaatcaggcatccaaaattccatgaaaaccagaaggcagggtgaggaaggaacaggaaccaggcagcagttctgtgcagtggcaccaagtgacagcaagaaggcagcagtactaccaaggcaagattacacccagccaaaaaaccaccagtctgcagggcagccaattgayactccaggcagagccattcagagctgaagagaaagcactaaaaaaaagtgcagccacttctgtgattaaagacaatgcccatggtactaaagtaccgtcttggagacactggtcatagttgttaaagcttccagccctcccagagaacatctctatgaaaaaaatactggtacagcagccccaggcccaccttctggaggttcagcttttaattttagttgtttcaagtgctgtggaaaagactagacctgatccctcagttcttcatattgccttatgaacactggccagaagggaagcacatccctcccttttgttaatttcctccaatattgctaagacaaggaatttcaaaatgttcaacaaatattaagaaacaaaaaagaaatgaataaagaaaataagatgggcaaaaataagtatgcatgcaaaaataagtatgcatgaaacataagttttcaaatatcatacactgacattgattaatcatcactagctgtcaggagagagtgctgtattgagaaggatttagcaacccagaatgtcctaactggcttggctcatgtctgctgtgggtaaaggaaaagcagggagtgctgacaagtctgctttgtatttgccaccctttgcaaataggtactcaccctattcccaaagagctaatataaattacatatcactttatttgtgtttgatttattacataattattattagaataattcacataattataaccagaagccccaaaagagcagagaccctgactgatttgttccatggatacctccagcatctagaacaggacatgacatatagtaccccttcaaccagtagttgcctgacttttctgccctcatttaatggatcctgtctctgaacctgcaggcatcatcatatactatcgtaagtgatttccttagcttcctaaacccagraagaatccacattctatttctcatggtttttttctatctgtatagcagcatcaaagtgggccctggtttttagtttgagggatatgccacttctgcaaccagctggcataaatgtggcaattgacacgataagagaagctgttctcccagccagggaagaggcattaccaattacaggcctatactataactgtgcctttaacatcacttgcatgtaagaatgcaggtctctatgttagaagagtgatatctgctcacagcatctcatctcctcctcagctctcccagcatttgagcgctctctccgcttcgttttcaaccatggtagtctaatcactggcaaaccaccagtgagttgattgcagccctttataattcctgtgtagtgagatgccataatgacttttccaggagtttccacatcatctgtttactccatgtgacattccttccatctgtctactttcagtttattttactttattttttagtaacttcatatcgcagatgaaagtactgtgaagtttcttctcaaaaccataatatttttgttacgttgcatgataacctcaggaaacatgaaattctaagaatttaatactaatatcattttgggatcattttttaaagcagtaaaagactttatgttcatgttgtctcacttttcagaggaattcatagctttttattgatgtaagccatttcataaccctgtcaaggtgctttgaggaagaagttaactgattgaacatcaacaaatcctggaatgtttgatactaatgatctcagaaggggccctgcctgatctacattccacctgagcactccttaccaaatattgctcttgccttcctctgcagtgattggttctgatcactgtagagaaagcatggaagctcattttacaaggctgcatgtgtgtctggctgctacctagatgcatgtccttcttgcacaggtcaatccattctctggtttttctctcctttgctctactcccttacacagaaacctaatttacctgtttctttcttaagctcttcatttcagaaaaactcaataaggaaaattaaaaaacccctcctttaggatgtctctcttatttctgccagctttttgaagtatgtgtgctctgggcaggggtggggacaggaagtgtatgtgacaaagatcagtcagacaaaacactcctggcatgatttccattttagagttgtgaaactgaagaatgggcaggtaaactgatattttctataagttgtgagaccatgattcactgatttgtttaccttaatgaagcatacgtaaaataattgataaattattttatcaataatttggtaatttcctcttggggctaattgaatatagtgagtataattgagtatacggtgggtggctttcaagcgtatctttccaactttcactattttagtaccctggctagaaaatgataatctgatagtgaaaatattaattcatcctctacaaggttctgaagatactaacttctcagtaaattcagatatagattacaaccattttcaggatataataaagaaggactaaaggtatctctttggtatgtggttctttacggccacataaatggcttccaagtcttcatttccttaagttcatttcctgctaccctatggacattgctaccctctccttctctgggttacaaataaatggttgatggcattttaataacaaagattaaccaggttgccatgttaaggatagatgggagaagcagtttgggaaggtagcctagacaaggtgatggtcttttcaggaagttctcaggtgtctacaataggtagcagaattgggcctgagcaaaagtcacatgagcttacagcaccctgtgcagtcaaactctcaacttcacttaagctttttctttgctttgcttctgcccactcacctggcctgttaccacccactgttttaagcagctcttcagctgcacatctactgtcctgctctgccctgaaataggatgataggtaggactgctgtacccacagtttacatgtccttaccctccatgtaaactgtgggtacagcatttgctacctaccgtgcttctcaaataccggaagcatggtttggacagctgaaggcttagcaatcattccaagctgcagcatctccttgggcctcaggctaacacccatatcaaaacaacttgcgcggtggcgggcgcctgtagtcccagctactcgggaggctgaggcaggagaatggcgtgaacccgggaggcggagcttgcagtgagccgagatggcaccactgcactccagcctgggcaacagagtgagactccgtcccaaaagaaaaaaaaaaattatgatatttaaagagcatatttaaccattaaaatagtaaatatgttgcttattttttttcttaattgaactgtagtgtccttattgttttaagacttcatcgtatattctggatacaattcctttatcatatatgtgatctgtatgcattttttccaagtctggcttttcattgtctcaactgtgtctttcaaagagcaaaaattcttaattttgatgaagtctgacttatcagttttctttttagtcaattttgcttttgctgtagtagctaggaaatctttgcctaacacagtcataaatattttcattttttacattttgtgtttaggtctcccgtgcattttaagttaatatttttacatggtgcaaggtgtatggattaaggtttgagaacagacagacaggaatgtctttcagatttataaaacgtaaatgctatatagttaagcatttaataatcttttctgaaaaggaaaaaaaaatgcctacatttgaaaccattctggaaaatgtaagataatgtggttttcctaaccaacagtagtcagcttttaaatgcagtactttgactttattatcttatcattgagattcaccatgtttttatgtaccactaagaaagaaaaagaaaaaaactgattaaattgtttaaaaaaaaacaaaaaccttgaagacaattttagttacctccaggctaatcatttcctttttcttttctttcatcgcccctgaaactcccccaagcattatccaaggtgtgggctctttttggttagtaaacttcacttgtcatctcctttgagtgtgcttccccactctcgtcatcttctgctggcttaactcgaagcccaaatttcttacttgtagatggttaacaaatattccacattctctgcattttcttcctgcatttggaacctgggtttcctttaaggacaccaactccttgaagtcacactccccctttctcgcacgcatacacacatgctcagacaatgagggtggctatctggcagcttccacctttcccactagagttttcaaatatttgccacactatgccagtgccaaaatttatataataatctatccttcagaggcttctccccttgagctgctcacaatttacccctccttctaactcacaaggagttacaaggccctggaawtgtgcctccctcgacagccacaagtgaaatagtcaccaggttcatggtcttactcgaatccctgtcatgcagggatttcttcatttgcttggaatgactcatcaaacagcctagctttacagttccttgacctcggctcttcccaggacttttatctccatatgtcgacaggaatctactttcttggcacttgttactaactggaactgtatctattatcctttctcaacaagaacctctcatatctcagcatccttctaaggctcgcttactatttcacctcttctgtacttctaactttgagccttttattcccttcctatttgcaagcttcctaggcttcatttttaggaccccaatgttgatcacttgaatttccctttcaccagctcactgactctcttggcctttcaactcatcctttttacaaacccctggagcaggtctctcatcgcccttcaccactcctgcagccagtcagaacagctggtcaaatgaatacaggaatggactcactcattcataccaacggtgttcacttgacctgccataacagtgtgattctacaggccctgcaagttcatgctgactgtatatctcactcttctgcctcagagctagagaaaacaacactgaaaatgaccaaacctcctaatcaggaactggtaaattaaactgtttaaaaaagttctctttatatgtgtacatacataatatataacttcacagaagtgagcaaaagtgattacactgtatgtataaatttatggggagaaatgtagcatctgaattcttttcctttttggtttagtttccagttcccctcttcccattctccacaccaacatcatccctcacctcataaacctacacctagaaaaactatgtcaataatctagaatgtatctgggattttttcccaagttcatatgcttaaaaatatatacacactcatacatataccatcatatacttataaacacacaagcatactgtggatatacaggcttttgggctttgttttaaaagatgagatcataatatacacatcttctgtttcttgcttttgtcattagatatcttgtagatatcactctagatgaaaaggttctaactatttttagatctaattattaacttgttcctttgtataaactcgtaaatatttattgagcacctaccatatgccacactgaagcctgggatttattcaaatttcagaattgagaagggagtagagagattcatagtccagctctcttacagaatagatggaaaatcaaggctccgtaaatattcgtgatttattcaaagtcatgcagccagttgatgccatgtctcaaatcaaaatctagctcttgctagcccccaagtccagtcctcttttaatcatactattcagagtcccataaattagcatacaattacttacaatttaatgtgaaaacatactacaacataagataaatcttcaggcctggagtagggagaggatagggaggggcaaggattcaggaaatttcctgataatggtttgttgtctgtgtggatagaccaaattgtctttaatgaaccaaatttatcaaccagtgaagactcattaagatgcccagcatttaaagggagatcaataaaagagagaacttagtattgaaaagctatgaaagagctttgaatgaaattcactctccgtcttagcagagcgcttttcaagagtgagaatcatgggtgggctgtgagggaagatattccctggccatctaagcacatctggaaaggtccagatttcaaactgtcgctcttttgtcagtgctgaaaaacttaaccttgagcgctaggaagatgttctccaagatgctgaaacttgtcacgttatatgagtcttcatgttcataggcaaaacaaaacaaaacaacaggcatatacatgacattaccttcttttttgtttgagacagggactcgctgtgtcacccaggctggtgtgccatgatcctatcatggttcatttctgcctccaactcctgggctcaagtggtcctcccacctcagcctcccaagtagctggaactacaggtgcactaccctgcctggctaatttttttctttaaattttctgtagagatagtatttacctatgttgcccaagctgatctcagactcctggcctcaagtgatcctcctcccacctggtatgaagcactgtgcctggccttgaatttcttaatgatgtttttgtgaatctatttgtcaagagtacaactgccagatttttgtgcatttgtgcccctctgctccgaagtacccygactgtcagtctattcattcagtcatcaaataactttggggcatctattctatgccaggcactactatggtaggccttcaataaagggaggctatgtttacatgggccttccacttcacaggcaagaaccgcactactgaatctcccgtgtctttgtccctccagataatttagtgtgcaccttatgaccttcactgacaaaatagcgaagaatgaacaaatgttccttaaagccagctaattctttggttattttaaagctgattggatcttttgtacacattctaaagactctaaagagagtccttgaaggcataatttcactgaaagacatgcaccacaaaccccctgaggcatccaactgcagggaacacctcagctcagtcagtatgtgatgagctttcatgtcgcagggcacctgacagttggatgaaaaattgctttcagtctgtgctgggttttctgtggcagttcagaagcaggactaggttctgggtctttactgtgtatgtcatcttttctttcagggttctgtgtttccatgcaaataattataatagtgtagaattatttgatacctactaagtgtcagatttcctgccatgtacttcacagacttttattctgtacaacaacattatgagtcatgtaatatcatccccacttcagaaagaaggttcggagaggtggggtaagttacacaatgacagaactacaagaggcagagcaggggtgaagctcagatccccgtgtctccaaacccaaggctgaaaccgctggctgcactaccccacacagttctgaggcagaagagaatcaggaggtgaggatgggaactggggaaggggttatgttctgatgagttagtttttaaaggagagccagattttctgaagcagaattttaaacatgaataggacatgttaacttgatgttagtgaaatatttcctagagttggggtttattgttgaatactaaactcatgggagtactgcataccactgtggaaaggtgaacagaatgactttagggaatgtgacagtttacaaagaaaaaagtaaagaaaggaaggaaaactagaattctcagtcctgaccaaaactatctctaggataattatggtttatctaaaacttgtttctctgggtaatcagataaccctgctctctgtgagtgtagacttctccacatgctgtatgaggatacctctgtgtccctgtagttaacaattttaattataggtgaagtattcaggttaagtggcctaaattgacactttacatggagaaaaaagtctctcatgagactatatgctataaatacataattattcatatttaaactcaacattctattgcttttatatttgttttatattcatttttcacaaagtttcctttgcaattgattcctgggtgatggtattaacatgtcagtattatttattcaagacaagtggaaaatctcaagaaaaggctaaaagacccttgggagcttacctagtgactacaacagaactaggaattaaatggctgtaaagtgacatgttgtatacaacacaacataatttattatgtgttgcattaatatagacgttttgaggatatcaacattagctgaggaatcctgatgtctgccaattaccattgtttggtaaaagattgggagttctggatttaactgcttggtaatgaaatcaacggtttgcttcaagttaatgttatacagtagatgcctagctgatttcttgtttcccctactatctaccttaaacgcattctgggtctcccttcatctttgtaggtttctgagctatttttgtactgtctacatatcttgattagctaatctgtatattaaccatacgttctgacaagagttcagtgacatggaccctcagcccatgacgctcactaccactgacatgttgcatgtgagtggtggggggagatgaaattagtttattataatatgacttttgagaagatatagcaaaataatcctctaatccattctacagaaaaccttttgtttttccaactttattacctttcattattccatctcagctgttttcactttgtgagattgctagggtcaatgggtgaggatctgccatgggtgtgtgtgtgtgtgtatgtgtgtgtgtacttttcactgtcaattattctaagaaaagcaaatgctaaagtgaagtgaaacagacaatggttcacagtaaatatcaagctgtgtttgtattgctgccatctctttgggagaatttcttatctgttcctacagaaaaattactggaaatatatatcaatgaaaacgtataaatgaaatcctgaaactatataagattcatatctcttgattatccaaaatagagacatattattacttatgaagatgaaatgtttgtggtttgatgctaaaacatttagtactaataattattccatatacagtgttcgcattaatctcgactacactaattcagagcatgagctctttgcctttgtgcatgaagacagtttcttgggcaaattaccaatgtaatttcctcgttgtcattccgcaaaccatctatgttcaaatattttaaaagcagctgtacagaaccaaataatttatattttaattctatataaatcaacatatacttctttacttggacattaccattttaacttcaaattcaacatgtctattttgaaacccttgatttccaggataaatcagtctcttgctgacttcccttctcttttgtttgtggtagaatgattcccctaatgttggagccttaaagtctaacttagtgactcctctcatgttttccatatctagtctggggcaacatccagaaattcttcctgttctgtttttcaactatctttttagttttatttctagtgccgccatctcagacctctactaattcattggaattatttttcatctctctgtctaccatttttttcttcttccaattcatcctatgcatcaatgtcactctattttttcatatctgcaaaccactcagtggacatccaatatacaagcaaaccaattataggtgaaatttaaaaatatttattgtaatttataaaagaatagtaaactaaaaatgaatggtaataacagcaattataataatggaaaacaactatgatgctaattaggaggaggaagaatgttttcaaagtctttcaccaggtatcgatattcatctcaaagagtttgaacaacagattcaattctgtgtagggaccatttcttcatttattctttattcctactaaatcagaaataccaaattcataagtcatttggaagggtaacaaatgtttgatggtttgtcaactagtcttgacaaacggattctacaatgtacagaaattatggagacagttttcactgatagatgttcagtgcctcaaaggaaactcattaagatgagggaatgccctctcaaatgtaacaggattgttgaatayatcaacacaaaagatcactagcaaatggattcctaatgaattcctggttgaatttgcctctgataattatgtattcatattcagtttgagcattcagatgtgttaaatatggccaataatagcactgatttatttcctcctttaatttagaatatctttaagtagttagaaggaaacccttgttaactaatccattgacatcaaaatttaactttttaaggaacttttgctgtctctcactaaatattagaaatgatgatatgttgttcatgaagtcataaagtcaggcttctccactctctgtttgatttttatgtgtatgtgctgctcataaaaatcatcacactggtagagattcttgttctcacaatgcagattcacagtgtattttctccctgaaaacttgttattttctttggaaactttatgccaaatgatatataatttgcagtactattttcatgtctttctacttttacatctccgatggattaatgttgcagcattaattcattttgtgtgagttggtactctaaaatacaataaggcagacagctttaaacccatgtgatgtttaatatcctacaaagaccaaagagtcatagtggatatttccctcaatctaaaaataagggaaaatactaataagcaaattatgtaaaaatgaatctgcttaaatagacagcaccctgtttgccagatgttacctgagacaaccaatccatatatcccatgtatgtgagatgtttaaaaatgtaagaattactaaggacatgataaatttttatgagaatcataattaatcatatagttcaaatttcatggtgcctgtctattgccaacccctagtttttcacaggtttcacattggaaagcaatgggttgtcctttggcttattttattttagtaattaactgtcctttaaaaacaataaaactttcagccttcagtgactttgataacctatgtgataaagtcagaactcattagcctgatattcaaggtcttcccagagaggctccatcttacctgctctgacttctgtcttatacctgctgatccacctggggtgtctgctgaaagcaggtcagcacaatgactcagattcttccctttctttccctctcccatgccccaggatttgtttgtacaactggcccaggaatcctgacttcatttattctctatgggttaacccaggttcttgcttgtgaatggaaacaggataatggagctaaacctaaatggcattttctaaccatgtcttcattattcattctctgaaccatcctctctaatcagtttttactgatttcttccccaaatatgcatttgctttctcatttcaacttatatttacactgttctattcatcagaaatgtccctgtcttgtctgcctcatcaaattcttcaactcccaactcctgtcttacttcctatataaaatcttattaggttaccttagctgaactatcttcttctttctggaattcctattgcaattacttttgttgtaattatttaggcagtggtttctttgatatcatttactgtgttttctggcaattgcactgaaattgtatactgctcttcaattaatgattatctatttccccaaactagattttaagcaccttgaggacaaatattgcctcatatgcctgtatttctgttccaggtctttggcatactgttaataatgaacaaatattatattacagtaaaactgtatcccaagattttctcagactcatctaaaatataggcaagaacttaataacactaatatgcctgttcaatgaagcattctattcaaaatgttttattaattctttacagcttcctcagcatctgattggaatcagtggcattttaatttatatgtctatttaacaaatactaatatagtgtgcactgtgtgttactcattttctatgcactttacaaataataattttatttaactttcaagacaaccatctgaaataggtgctattattatccctgttttatgtatgaggaaatggatttactgagaagtaactcagccaaggtgatggaattagttactaataggttcaggatttgaacctacatttttaaccactgtgctctaggaacttagttaacagctttaatgaatgaaatggttctgctaattgatgtaagaaactacttacatgttttgttggctaggtcacctgtcactctcagttcagaatctttcaggaaatgtcctttagtctctggtgggaggtgtactgcaactaaccgtcctttgaatttatgttgccatgtacagtccctgtaattttatttcctctttctatctttacttttgggatctaagcttccttgaatgtttagcctttttgtctttttagaaaatattgttccctttatgaatatgtctcttaattgctagagtttcctaatagccaaatgaaaattacattttggcttagaaaatgctttcatctgtatccactggctatatatctgcaaccaaagtaaagtgtggaattgggtatttgttgtttgcagcatttgagcagtgtacacatcaaatgtggttaattctattaccagtaatatttctagtttcttctaaaattaccataaaggtttaggtctagattagataattatttccaatcaatctcctttcaagttggaaatgaatgaagtcccatgttttctgtgtgctatttcatatattttggcatgataattattaatagcaatgtattactattgctcttttgcttacttaaaagtatattttgcagtggtttattttattctaggtgggagaataacacgttgatatcttcttgaaataaaaattatatgtcaatgaatgtgacaatgttctatgtaagtagcaatcgaggaatgactgaaaagggattattaaatatttcaatgcatgggaaaatatttcttctacctatttactgcctaaagtaaatgctaacccagaagatatttatgtcttggtttagaaatctgtagagtgacagagcaatctgagctctgtaatgtatgcaaaatttatcaggctcagagagacatgagtatgggactttggccacataccatacctgtgcccagggacaactgttaggaaacattttgttccagactagttgtgtcacctattatcttcatgttcctggaatttgtgatacaaagaacaatgtatagccaatcgatagcttatgtatttgaatgtatattcttggtaaacaacttaggaactgcctcttgtttttttcctaaaaaaagccacttgtaatggctggtagttggagtgtataatcagagcaacttgaatctacgctcctgagtggccatcttcaacaatcaccctggaataaactctttttaaactagaaaacaaaaacaaaggaaacaacaaaaaagaagaaatctatagagtgaactatatttttccaccttgcaaatagaaggggcaaaaatcaaccttgcctatctgatgatttagtgtcatagggattccaaaatgttatttgtaacgtgtaccttgatatgctaatggtgaaatctcctgtttcttgatttggtcttctcatcttacatttcttacctcaaatccattctgcgacttcaccagcagattaatattctttcctggtctcttggaattttaataaaaacagcatggtcatggggtttcatgaagcttgcagccctctgggggatgcagataataatcaatcaatctcataattaaatgtaattttaaataagagcttacaaaaaaaaaggaatatggtgataatagagcctagacaaagggatattacccagttagtagatgtgtatatgctgggcaaagggattgatatttaaataatgtacaggagtcatctaatcaaaatggtagaggtggtgggtgaggaaggatcttttgtgaaaatggaacaacatgtataaatatataccatgatgggcaggagcacagagattttgagaaaataaagctgtggtcgcagtcacagctcaaggagacagtgggagaagggaattcggtgaactggtaaaggtggcaggatcatttggtacctcataggctctgattaagattcttcctatatctttagagctgttgaaactcactggagtcttcaacaactgagtgacaggattagatttgaaaagatcattcttgctatggtgtagagaatagtcattcttagatcattcttgctaaatcttccatgagaaagtgagtaacatagatttgaaaagatcattcttgctataatgtatgaaacagttgggaagaaggtaagttatgggaagaccatttgaaggctatcacaaagagaaattctgatcatttagattaggtgatggagagaaaggatgaggaacccagaagatagtgggaattaccaaggcagagatgtggataatacagtccatgactatagaacaggaagtgctgaaagagcatgtttctgcacatttagaattaagagggatttggagcatctggagcagaatttgtttgttgggaatgatgactcgggagaggcaggtaggggccaaattatgaaggtccatttttgtgatgtgatggcaaaaggaacaactgaataaattgagcagggaatcacagtcagatgtggagtccagagaagtctctgatggtgtggaggatgctccacatctctcatgaaattaattgagaaactgctatttttttcatctaagagttttaattatctttcatttagttcccagaggctattgggcataggcacctagtaagtaactgttaataacaacatgcttattttgggcatggcaatgtggaaatttattcctgccgagtaatcagtgccagttttatgctggcagggttttaaaagaatggagaagggattcttttgcctccattaggagaaagctgtgccttctcttcatcatatagtgactcattcaaggttggcacaaagtaactttaatcaattaatgtgaataatatcatacctttttaagcctaaaatggatattagaggctatcagccccctggaaaaaagtctgcagaatatttttctttcaatgataatgtcatatatatcatagcccttgaatctttccaaaacatttagtcaatactgaaaacatccctagagagacactcatccaatttctcacatgtgaatcttttatctatctttggaaaattttaagaagtgcttaatttcagactgcttttataaaggacataactagtagcatggtaaaagtgcagtccatgaaattaaattcctgatctgaacctcaggtcaattaacttctaaaaatactctttttgagacaggatctcactctgttgcccagactagagtgcagtggtgtgtgattatggctcactgcagcctcaacctcccaggttcaagtgatcctcctacctcagcctccagagtaactgagactacaggagtatgccaccaaacctatctatttttttaaatttttttgcagaaatgggatcttgctatgtttcccaggctagtctcaaactccagggctcatgtgatgtgctctgctgggtgctatactgggctgacaatggtgaataacatctaattcttctccaaagagagcgctcttcaactgatgagggaaataaacaggagagcaggcagtgaatgatagagcagtatcagaggtgctaggttgaggatcttcacaagcttctaagtcaggacatcctaattcaaaccaggaaggatcaaagaagacagtaaagataatgaccacaagttgagtcttgctataagctgaatctggaagatagaagtgaaattgtccatgaaaaaggaagaaagaagaatgtcgaagaccaaaggggaaagagagtaagacaaggtaaatcaccttttgatatcgttgctgagttgtgtgaaaggctgtcaaagtgggcagaagtcatgttcagaagagttttacattcaaattaaggagtctctgttagacagctttaaatccatgtgtctaatatcttacaaagaccaaagactcatagtggatatttccctctatctaaaaataataaacttttctttccaaagggaaaaatttttacttatgaaaaatgtggtaaaatatagaataggaaattctgaaagatacaagttcttcttgaacaatgagcaatgtaaaaatgataaaattattgcatgatacaatcttttttaaaaaagagaaaacactgagcatcttttccttaagccccctttcataaaatctcatattwtgcccacttctccatcttaatgattgtggatttctttctcaagacctacttaatacatctcagttggaatttcgaaatgctggcaagtctttaaaaatagacagatgatgaccctaagacatttggaacttatcctaaaggctgaggcacagtagagaaaatatattgaataatatacaattttggtcaggaaatgaggaactgctaggttagaggccccattttctgtgtctggacactggagagaatgcttgtgtttggtcctccaattaagagctgcatgatgcctgtgccctgcaatgccaacacttattgggaacccataacctttgcttctccaacttctccagccaagattatgatgaaaaaagaggcaaaccacaattgccaagtctgttctcagcaattcgttcactggtctttcatcattaggcacattgcccctgtgtacctttggtcccaacgcataaagggatcttgcattgtaagcacatcatatgtttatttaaagaattttgaatctttgcagctcttattgactgttcagcagtgaaattagctgttgaaaagcatttgcactgggggtcgtttctggaaagaaaagaagtatttcttaccttcttctctaagactgcacattccttgggggtttacccatttgagactgcaagaagatgaaataactcacttttctctattaaaaggtgatctcaattgctatagagagaagaaataaacaattattaatattcctgtgtcagagagtgtttataaaagcaaactgtgaggttcgtaatctktttttagacaagaaaaagatttaaagaatgacttaaagtgatgattataagaaaataaggagaaaaaggagagagaggagaggttaataggtaggggaaattgattctagaccaagcacttaagaattctagttctatgtttgatttcctttttatacatcttgcactttgctctaaagcaaaggagttacaaaatttttaggcaaaattttctacccatgattagcgagcatttatagaaagaagcaataagttctttcagttgaatacacccagtacctctaaaaattaatgtaaagagcacatttcatggtcactaaaagaagggtgcaatttaatgtatgatgttaccatttattactaagaggacctgatacacaaaaatataaattactttttccatatcttctttcagcttcaaatgattttgattttttttttactttagatactcagagtagaatttataaagacatttggggagtatttctacctcaaaggaaaacaaaaatataatgacatttaaccatttcagatatttcatgatatgtagttagttttgtgtatgtttctactacattaaaatatccaatttattggttgtcttgaaaggcttttgttttctgcagagattggatttccaaatatattaaaataattgcagtatttatattgtccgttcttaggggctgtacttatattgcatttctttgcagagttattgatgatgtatccttgttctgcagtatggcacttggcaaaacattgcttcctagtttgaactctccaatgtaaccttcagggggaaatggttctagaataccattgcatcaactcttttagcaaattgcattattagacatccatttataacttatcctctaagtgatctcagtcgaatcatttgctgtcttggtttcacttctatgaaatattctagagcaaatgctgcccttgcttgtgtcataggactgcagtgttggatgccttctgtgaagttcatttagcccctcataatatgcattccatgtaactaggagggaattttctttgggtagatttctcagataagttgtagggggtggtgtgactggctaaagtacatcagtaagagatcattggcttgtgaggagtgcaaaaggcaggcagacaaggggaagaggaagtggaagaagccctacacatattgagcaccagtccacaccacactccccatgaagcacttttcatacattgcctcatgtagactttgagatgactctgaaatctgggtgttattagaggccagagatctcaaaaaacttgctctagacacttcatacaaccggtaaagggtagaattggcatttgacacaaatttgactgcctcctaaacttaatacattttctgcaaagttattggagacaatggagcatgaaatatttcttagtttcaggggttgaagtatcatctgcacttagttttcttctcaaataagataaactctaaacaacaataagaaaagtagatttgtgagttttgtacgaattggccagctattaatatcatttggcattctaaaggaagaacggctgaagtaaaccacaggtgcagatcaaatcttgatgtctgtttcactgcaggagacaaatagaatctctctttcttgtatgcttctgttatgttgagtctaaatctgaggtaatcatgatcatttcaacctgaggtatggtttactaaattaggagaaacatacaaaagtttgttgacttttaaactaaagaaggcaaaagccataagtgaaacaattcaagtagagtgctataatgtgactgtttctaatgacaacttgaattgattgtaaaataagtctggcagttaaaatgtattagtgttggctgagcatggtggctcacgcctataatcctagcaccttgggaggctgaggcgggcagatcatgaggtcaagagattgagaccatcctggccagcatggtgaaaccccgcctttactacagatacaaaaattagctgggcatggtggaggctgtgcttgtagtcccagctacttgggaggctgaggcagaagaattgcttgaatccaggaggcagaggttgtagtgaggtgagatcacgccactgcactccagtctggtgacagagtgagactgtctcaaaaaaaaaaaaaaaaacatatatgtgtgtgtgtgtgtgtgtgtgtgtgtgtgtgtgtgtgtgtgtgaaattatgacagaatttacctgtaaggtgttagtcatggaatactatgcagccataaaaaagaatgaaatcatgtcctttgtagcaacatggacgcagctggaggccattaccctcagtaaattgaggcagaaaaagaaaaccagataccacatgttctcacttacaagtgagagctgaactgagtatgcatgtacacaaagaagagagcaatagacactgaggcctacctgaggatggaggttgggaggaggatgagaatcaaaaaagctacctatccggtactatgctctctacctgcctgatgaaataatttgtataaccaaaccccagcaacatgcaatttacccatgtaacaaacctgcacatgtgcccctgaacctaaaagttggaaggaaaaaaaagggatagatgttagattattccaacctcagcattttaaataacctctatgactttcttagataagtaatagtaataccaaaataattagagagtggtagagttccatcaccaggtctttaccctcattttaggaataggttaaggcatcaagagataacgtaattaataaaggattatgctgtgatctgaaacacaagtacagtatttgtatttctgagctaagactaaagtccagatttctttcatttcggtgcttgttcgtttataccacactgccccaaaggacactaactgtaatagtactttgtcctgacatttaggacgcactcacacccttttgtccagatgtttctgtcttagatttccttactaaacactaggattgtgaaacctttcctttcctttctagggacaaaatggtattcactggcatatctagtttaatgctttgcgtacagggtgtgccacagacaattgggttaatggttgtaactggttaattgattgacacttaattttcagagttcgaccataactaaagagagatgagctccttgaggagcttcccactcccctagtcctcttctgctgaaaactactgggtcctcaatttttcctgaatacaccgctcatgtggccacccctaactgacccagttgaccatggatccaatttcagccactttgtggattggccaaaactctaaaaggaagcttaccatcaaaatttctgtccaaaaaggaatgatgaacaattatctaggccaactgaattcttctttactctggtactgaaaacatataaaagaaaggaggaaatctgagaccacaaggtgggaagggttataagaatttacagaagtcacaatgatgagaaagcagaagatatgaggtggagaaggtaatacatacatagcaaagaagttgatatcgactagatatggcagctgcagtgaggccagagatccactgaattgctgcatatcacaaaagtggagaaataataaacacatgattctgagggaataagttagcctgtatacttgaggtgccttagatcctatgcttttccagttctgcttcccaagttcatgtaccattccagcaaattccggaattcttttcatactattcattctacaataacttgacccctctttttgttgacgatgactttctgttgcttacaataaaaagaccccagtagctgggcacagtggctcatgcctgtaatcccagcactttaggaggctgaggtgggcaggtcgcctgrtgtcgggagtttcagaccagcctatccaacatggtaaaaccctgtctctactaaaaatacaaaaattagctggacatggtggtgtgcgcctgtagtcccagactcaggaggctgaggcaggagaatcagttgaacccaggaggcagaggttgcagtgaagccgagattactgttgattactgttacactccaacctgggtgagagagagactctgtctcaaaaaaaaaaaaaaaaaaaaaaaaaaaaagamcaaaacaaaaaaaagcctaaattatacaacaggatccatgggagaacatcttgatagctttttagcaggaacatcacattccaaatgcttgctagctattttctgagtatcagttatatttaccatgatcctgaggagcagaccctttattgtgtcccagttcagtttgcatcgtcttcatacagcataaggcaacagtgatagaaataatctctagagtaatctccaagtacctttccaaagctgctatgcctcaagtacttcctttaacctttaagcgtctgccttgcatacagtcctcttgggccactcttggcaaaatatttggaaggagatctggaacctgattatttctcaatgaaaaaataatttgcttttgcactgggaagcgacagtaatccaatataagcatgccattgaaaaccttcatgccctactatttcttttaggacttttgtgaaccctttctctttgatacattacctttggcaatcatggtattccaggacgtgccaatgaagttggctgaatctgaatggtcttggaagagtggtttgtggttggaatttctcttgcttgttgatatatgtactttccatgttggactttgtgcttatgtgaattctccacgtctcaaaggcattatgtctagcaagcaatttctcataaattcttatccatacagttattctatgagagcattgcaaatatagtcagattaggctttgatttgtttttcattctaaygctatctaacaaggggatgttctgatttgtgtagccctgtgcctccaagaagttaacggtaccagatacacagctcatttattttcattgtgcccatgtggttttctgaagtcacactttgtgttgttttacatatgggaaaatggaaacctggctaacttgtctttagtaagtgattggtggagaaattagtagaaactacatctccaaattcctgatctaggtaatgctgtttcaacaagctaagttgcatttgaattttgaaatacccactctagattgcaattaccaaatagttgttatgtacccaatcacaggatatgcttttgaaatttttttcattagtacatggaagagagagttttatattgtggtaggtagaaatgcccagacaagacaggactgagataaattaatggccagtccatttattttgataaacacaaataggactaatgcaccttgagctttaggaactagcagggcatttctagttgcagcatagtcacactaaggtgcaaagagtcaatggacaagcaaaaatgtgtaagaagaaaataagattctttgtttgttttctttatttgacatatttaaaagaaggcaaaagtgtatcttctaaaaagtacattttgtggtagacacttttcctctgctaaaccatatgacatcaagtggcatcccttttcttcctttgtggccattctaaccctgatcccagattggacaaggttgaaatatcagcatgaagtgaagttggttctggttaaacttttccaggattgtcccatcttccagtccttgtaaatgagtgtcatgctttgttgccaagtcaatgaggagacaatgttcacatggagacccttgggcacagatgaaactggaattccttctcacccatttcatacagatagtatgaaactcatttcaactgagaagtgaaaattctggttaaggaagaattggtacttgaaagttgttactttaaaaaattatcttgattcatggttttacaagtcagttataaatgttaatagcctccatcactgtcatgttagctgttgtttcagaaaagaaatacatattgtagtagttttaatagaaggagtaggacagtaaatgtaaatgtctgtcctaatggattgttttatacattagagaacaattttttaagtgatcgagtaaacaaagtccccctcctacctccatggtgattgtttctcatagatgaaaacagttttctcatcctgacgacgacaacaacttcttcttcttcttcttcctcctcttcttcttctttttttctctttctttcctctttatttttcttctttctttcctcctcctcctcctcttcttcttctgcttcttcttctgctgcttcttcttcttctccttcttcatcatcattatctcatcatcattatcatttcagtgaccagttagtgagcaccttcatgtccaagcactgtctggggtcttcacagatgttatcctaatcttcacaccagtttaatacaagtgtgttaatatatttgatatgagtgctaggatatagtatttggagatgagggaagctaagctcaaggtcacattctgctggaactggatttgacaccagagctgtctgattccaacacccacactcttccctctgccatatcctgtgggtgtgtatcaagttttctcccttgcctgtggataggttgcctattttttaaattaagctcactctttatttctttccttctccctcctccttccccaatttcccttttctccttctctttctttcatttttttcccaagatgatatttacctgcaatacactattgaaaatttctctatgcttctgccctgatctaatacaatttttatcaagggaaaaataacatttactaactaatacctttccctgtagaacctgatagaaaataaagcataaaatttaaagtttatgacacactgcaattcatccaagggcgtctaaatgttcaaagaggcacaagagagagataatttgcttttaaaagaaaatgaggccaggctcagtggctcatacctgtaatccaagcactttgagaggctgaggtgagaggattgcttgaggccaggagttcaagaccagcctgagcaacatagtgagatcccatctcttaaaaaaaaataaaaaattagccagctgtctatttaaaacaagaaagaaagaaacagaaaatgggaggaattcaacttttgattagattgtattggatttctgaaaggaaaagggggtaccaaaaaacagagaatttgttgattaagtagtgtttaagagcagaaatgtctgatgttcagtttaaagatgcctgcactgctgtgatgtaacctctgcttgcctgatactgaactctaaccatgtgtatcacatcctagacaggggagggaatggaggataattgacaagaacagcttttgatgttaaaactaggagccaaatgcaggcagggaatactgtgggaagagagcaactagagttgaaaggatggaattttccataagcaatacaaagatttttgatacctgactcctacttaaaattaattcgactagaaagactcatctttttctgaaaaactttctaatcatatatcacttattttagttccacatttgaaagcactgttgccacaaaatcacctattcttttactgattttattaattaataaaagacattgtgtaggacagtatatttgtcataattatgggcagatataagcattagctccattgcaaaataggattaaaactgaatgtacagtgttgtcaagtatgaaatatttttcccagaataaatgagtagagaagcatttaaagtctccaaaaactccaaggggcctaagtgggctctcttccaaaaaaataataataacaagttatgatcatattaccctgaaatagattcaattacccaaacaattagtcagctaacaaatatttatcaaggctcactcttctaactgatctgggatacagaaggattgtaagaattagtatcctccctaatggagttttcattctagtatgagagacaaaagtaacacttaaaagctaaaattgaatgagttagttacaaagtctgtggggttgactcgagtagagggtggttgatcagtgtaggtttaatgaaattaaaatgagtaagattctataaatgcaagactggccagagaaagtggggagctctggggccagaacagcagaggaccaaaggcatcctacacagccaattaaggaattttcctactgmagcatggggtccagggagcttcatttgtaatcccttgttctgctttgtttcattcttggactctaatatggtttgactgtgtcctcacttgaatctcaccttgagttataacaatccccacgtgtcaaggttggtgccaggtggagatgattgaatcatgggggcagtttcccccatactgttctcctggtaagtaaataagtctcattagatttgatggttttataaaaggcagttcccctgcacaagctctcttccccaccactgtgtaagacatcccttttctcttccttcatcttccattttgaatgtgaggcctccccagccaatgtggaactgtgagtccattaagtctctttcctttataaattgcccagtctcaggtgtgtctttatcagcagcatgagaatggactaatacagactccatcacagacctttgggctaaggactttacctctaggcacctgccctattacttctattaaatggtgtaaacacagtttgctcacccatgcaattgccttactgtgattcatcttgaagtctagcctgatgacagggatactatgcaccccacaaccaaccctactgagtaattggctccattaaaacaagagagaattgtgagataatctggatagagttagagttcacaccaaacatagagtttccaatttaatggattagtttcatttttgcaacattcagtactgataggatgggtcaattttggcagggcctagttgccatcttaaagcgaggtacggggtgctatttagagcactttgcagcaacaaagaggacaaggtttgaggataattctaatagctcttatacaaagatattgaaccaagtaaatttataatatgtgggtctgcaaagtattcatgtttcttgagaggagtgcttcagattgagagacgggagcaatctgtaaagaaggaacccaatggatggacactggggaatgaatatcaaggacacagttaggtatgaatttaagctagatgttcacttaggtaactgtagcctggagtggaatgacaggttagaagaagtctcctaggctgggtgcagtggttcatacctgcaattccagcactttgggaagccgaggtgggaggatcacttcaggacaggagttcaagaccagcctgggtaacataataagatcctgtctctacataaaatttaaaaagttagttgggcatggtggcatgtgcctatagtaccagctactcaggaggctgaggcaggaggatctcttgagccaaagaggtcaaggctgtagtgaactatgattgtgccattgtactccagcctgggtgacagagcaatactctgtctcaaaaaaaaaaaaaaaaaaaaaaaaaggacttcaaatagcttacctatgaagaagctgcttggtaataccttaaatttcccttctatgcttttacacagaaccctaaccttgcagttgaggacttgagtcatctcacaattcttttgggtaaaaaaaatgtaaactactgtgacccaactttctttacagctgggaaggcctctatttgattgaaaatataaattaagatactaggttttaagttaaaatattaaattacctctagcttttaaaaatcataaagatctttctttaactaacagtagagggatctagtgtttcaagtattgaattggtttaactgagcaatttctgaatgtcaaagcaacagattctctaataacatcttttgtttttctaaagtttattcccatattatgttatattatcagagagccatgtaaggggactatcttactttatatccccatagaatttccttcccagagttacaatttaacattttgtcctcagcttttttatagaggtcaatataagaaatagcacaggaagaatctcttctcccctctgccctttactctgggcagaattaatcctttacttgtctatgtatatactgtgatttatatatactgctatggtagcacttaggtaataatattattgtaaggaattttgctgtctgagataaatcttccctatattctcccctttgttttactccaaaggactataatcctgcagagtttttcactaatgaatttaggcattatttttctctaaaagaaagatcacactgaaaattatataaaataggctgttttcctgggatacccttgtggcttgttagaacacccggagtcagctggactggactgccactcttcttcacttactttataggcagatgctattccttttagagactgtctctgaaagtgaggaccctgggttatgtctgatcgttgggcggggagggggctttaaggttctaatttttgtatgtgtcctatttccatgtcttgtttcccagataaactatttccttctatgtctctgctttcctgaagacaaaggtacctttttctcagcagtggagttggagaggaaacagattcaggaagagtccaatattactaccattattgcaattgcgtagtagtacatgccaaattcaccctgtcttttcattttacttacctttctcttgtcccacatgcttttattcttggcatgcttacctacaaaattatcctttttttctatttccgtattccctatgccctgtagtcttctttcaaagcccctttgaaatgctatcatgaaagayggatttcttttctcagtgctgtgagcacctccatctcctcttctcttctttcacggtgcccatttcttcttcatctcatcaagtatgcagtcctttcttcgtctgcactgttatgtacctccttccacctttgtttcttccaaacttgtatttcttttgtctttccatttaacaggcctcatttcttttatcttaggaatctattcataaaatttatacagtctttaaggtgcaaacaccttgaaggtagagaccatattatttctatgttctttatattggcactccaattaaacaaaagtctatgtccagttgaagtctggaagcctgataagcacactgaagtaaaagtcgcaatacacatgaatgactgaaagtaggttttgttaccagtggaaaagacatttgtgagaacaaaatgacacataaagaggaagcaagtgattactgacttactggaaatcccaggccgggcacggaggytcattcctgtaatcccaacactttgggaggctgagatgaggggcttacctgagctcaggagtctaagaccagcctgagtaacaagtgagaccctcttctctaccaaaaaataatttaaaaaaaattagccaggtatggtagcccatgcccatgcctgtggcctcagctactcaggaggctgaagcaagaaaattgcttgagctggagaggtcttccagcacctgaaagacagagaaagaccctgtcttcaaagaaaagaaaagaaaagaaaacccatacatttagctcaattgactaaaagcctaaatgaaaaatatatatctttcagcttaaagggttggttggattgatttgttgagtaaggtattactatttggacaattgtaaaaaggacctgtgaaagccatattttggcttggacaagctcacccaccccatgccccatctctactaagggggggtgggattcactgtcaaaagagttcttctctttaaattctatacaataggtacagtaattatatctaattgcatttgaaacacaatagttattaaggcaaacgtttctagactagtttcattattaaataaaaattgaaactgagagtttttcccatattggtaaatattgwtttaattttttaattgaatgggaataatatgggcatttttttatcatttgcccaaaatattttaagaaaatactatatagtgtaaccttttttttttttttttactatgaaggcattaattttgttttatttttagtacttgcttccagttcacttttcaaagtgtcctttaggcttgttagtttcaaaggaaataatatatttccttttgacttaaaatgcctatgctatcattagatattaatagtagaagtaacagcaggattgcctggcacaaatttgtcctgtccttcttctggctaggcaatagggtgcaaatgttccttgctgtgcttttgatggtgaaatagaaataacgcttcacattttataacacattatatttcataaagctctttcacattcatcacttcatttaatcatcaaaaacaattctgcaaactgatattatttttcacatttaagtgtgagaatattgatgctcaaggaagcaatgatttggctgaggacccaaagtgagtgtcagtgccaagacttaaatctatttcttctcactcactccagagtccttcccacatcatcacactgtctccttctactgtgctttgctctaacctgctgaactaactagcaagtgtctttagcatactacattagatagctaagacttactgaatgcctactgtatgccaaatcctgtcttaagaacttacatgtgttacctaattcaatccttgcaacccatgtatgataggtaatattattatctccatctcgcaaataaggaaacatagaatttaaataacttgctcaggaaggcatagccaataaatggaataagtaagtctcaaatctggacagtctatcttgagaaatgcatgcttaatcaccatcctctattgcctcttaaataatcaaagcccgtaaagattttataaatgacttttctcatgaataatagggcctggggtgagtttctcaatatcacttayggcaataagaatttcagcaatcataatcttggtgcattttccaaaaaggatggctccccattgggtaacacaaggtgaaatgtgtattctgttagaaatttttgattccagcctagggaggtatcaagaataatgctgttgccataaagatataagtcttgagacaaacactggagaggttcagtcattcaatcaactatacatatattactgaacattttttatgttcaaatgctgtgctaagtatctgaataatattcacatgaagctgaaaatctatcaaaaatacatttgaatacagatacttggtaaaatctctaaaatgcacaaagcttcatggacacatgaaatttctttactatggagaaatcaaggaaggtttaataaaagtagtaacattagagctaatctttgggtaaagaagaggaaaagacaaattgtagtgcatgctgtaactgtatataggttctttggagatagctcattgaatgcaaactttcagaactcacttcatgagtcaataggaactttacacaatggtgagaataaagtgcatcctttcaaagcacactgtccatggcgtgagagtaaccaccacactgacatttgttgaagaaaggttctcctgggttctccccactctaccctccttggatgccaattaggcaccttaggaaggacaagtgtcttccctgtcccaaagaattgatttttatagatatttatatctacttttgtgaacatgcaatgttcattttgattattattaaatcaatgtaaattctgaatgaatttctctgacttttactttgcttattaagttgaagactcaagggcaatgcagatgagaatttcagattcttcctttgagaggatttttggtcagtggctctttaagaagacccaaagcaggttgggtatacttcgtaaaatcagatacttggtatatagttcttttttttttcttttctttttttggtaacatcaccacgaggatttctttgctgaaatgcactgaccttctgtaaaaattaacactggaagtattttccaatggaaattgactaataaagaaatcaataatgaaggaatatttttagactggcaagaatcatgatgacactgttaagaagaaaacattgtacatatttaatatgtttaaattccagatcctcaatattatgattaagaatttaatgatttttgtttataattccttctcattgtgtgcccacatcatacttagcttaaattatgtatctaaatatgtcttctctataaagtttcttgtggtcagaatcaagtggtccactagtttcatttagcagtagatgtatatattttgacacataccaaagaagtgcagctcagtacccaaaagatgtactaactgaaaactttagttcatgtaatatgcccggcattcaccctcgcggaatttagacaggagggattgtggcctgtatgtttgacttctggaacttaccttagtaaaattcaaaaaacaggttcattagtaatttcttcaaagaaatctgcttcaatttattcagatgttttgtagtctctactttgtattaaatataaagcactgagttaaagaggtaaaaatatcaaaatgaacaggatagtctctctcctctgggatcttataatcatgtaaagaaacagatatgtaaaaactgtaaaaaagatatgtacaatataattataatataggaaaattaaaggccatacattttgtaaataaacagctatgggaacaaaaaaatgtgcatttttttttctaattggcaaagtctaaatgggattgtggaggagcagtttgtatttaagcctgcaattgaactacatgtattatttttaaaactggagatttgaagggaacactggtggcaaatagaattgtatgaacaaaggaacagagatttggaaaggcagatggatgtcagcatggctagaggacaggtacacagctgatggggcagaaggtagctatgaaaggtttgcagaagtcagattgtcagtttcttttaaagcctgctaaatgtgtacactttattgtgtaaacagtggcaaacagtaaaggttttgaactgtaatgatgtagtggtctgggctaaactattcagagcaagcattttaggttacagtaactgaactgtgggtttttgtttacatgtatccagagttgttccctacctttgcaaggtcagtgtctcagtgatgtgccttaaataccttgtccttgaaatagaacctcaacatcttcaccttgttctttttttttaaaagaccgtgtcttactctatctacaggcatgcaccaccatgcctggctaatattttatatatttttaaagatgggacctcactctcttgcccaggctgatcccaaactcctggcctcaagcaatcctcccacctcagccccccaaagtactgggattacaggcctgagccaccatgcacagacttatccctctcttaaaaaaatttgttttcaacaaattcatatgagtaagattaagaagaaatggtacaaccagacataagctgaaaagcaaaagtctcctttcctactttgtttattttgcttcccctttcagaggaaactacatttgatcattaaaccaatacatcatttatattcattttttcaaaatatattaggttggtgcaacagtgattgaagttttgtcattgaaagtaatggcaaaaaccacacttttgcacctacctaatataaaacttcatttttgttttgtctttcatattgatgaaccatcatytgtttatttttttggatattggattgccttcattgttttcactattataaatacccctattacacatacaaaatcaaaataccatttttgccttggctttttaagaaaataaacgttgattttaaaaacaatttcagatatacagaaaaattgtgaagatactacagtgaattctcatttccctctaccatgttccccctattatgaacatcttatattagtgtggtagatttgttacaataagtgagtaaatatgaatactaattattttttattgatatctgatattatttggctctgtgtccccactaacatctcaccttgaattgtaataatccccacatatcatgggagggacccagtgggagataatttaaccatgggggtgggtttttcccctgctattctagtgatagtgaataagtctcatgagatctgatggttttataaaggggagttcccctgcacatgctctcttgcctgccaccgtgtaagacatgactttgttccccctttgccttctgccatgattgtgaggcctccagagccatgtggaactgtgagtctattagacctctttcctttataaattacccagtcttaggtaagtctttattggcagcatgagaaaggactaatacaatatcaatagatgttgatatcaattatttttatcataatttattcagattttcttagttttcacctttgtcttccaggagcccatcctggataccacactacatttattcattatggctccttaggttccacttagctgcaatgttttctcagacttcctttgttttggacagccttgtcaactttgagtaatactagcagggatactgatgttttcctaagtaccagactggcgttctaggtttagtaaggaagttcacagaggtaaagtgctatgcatgatatcaagtatacatattatcaacatgactttacaccattgatgttgaccttgatcactgggctgaggtagtgttgtcagattactccgcctgaacatcattgacttttcccctttccattctgtactgtttgggaggagctcattatacacagttcacacttaaggagtcaggaattactgtccacccactggagggtgaaatatctacataaattaattgaatttttttttcttgagatgaagtcttactctgtgggccatgctggagtgcagtagcacgatctcagctcactacaacctctgcctcccaggttcaagtgattctcctgcctcagtctcttgagtagctgggattacaagcacatgccaccacgcccagcaaatttttgtatttttagtagagacagggtgtcaccatattggcaaggctggtctctaactcctgacctcaagtgatcctcccacctcagcctcccaaagtgctgggattacaggcgtgagccaccatgcctggatggaattcttttgtatggcagatctatttcttctatcccatttatttatttattaattcatttatttacatcaatataggcttatggatattcattttatactttgggttaccatccaatatgacttcactttgttgcttaaattgttccagctttggccactgacttctgtgcccctctgacgtttcccatcagtgtgggatttttttttttaagcacttccttactttctggaacgacatgattctccaggcttatcttgcatattttctgcttcaacattaggcaaccagttcttcaaggagctatgactcttttaattggggaacagaacaaaagccaagacctgagtgctaagtgtgattgttactattggggtgcccttgcttctagagcttctcagctgataaagtaaagaaatttatgtgtgtatactaacttgtgcctgcgcacctatctataaatatttctatatgtaaacttctgtgtctacattaagctaaacatgagtacattttggtgtttccaagtctaatatattaccacctggttagtctagcctattccccttgtttttttctgtaaaatcctacaccaaagtgagaaacatggcttctaccttcctctatccattcacataattattaaattctattgtatgcttgtagctgaacaaaatttttaacccatattgctgtaggaaagacactttatcaactagagagtttgagtttatgtgcagttcctcttccttttagacttacagactccactcatttccaaaattactgttaaccacttttaccttcagtgaggttgtagtgtacatttgtgatayagttatattcttttggaacagcctgcattccatcctgtgataaatatgtattgcaaactctaaagaaacctttttaaaatgactaaaaagaagattaaagatgcagtgatgcgggaaatcagtaaggatataaaatcagtaatttgacctgaacagcactatcaatcaatttgttctaattgacatgtatagactattccatccaacaacagcagtatacacattctgctcaacctcacctggaacattcatcaagtagaccatattctgggccataacatttatcttaacaaattcaaaagcgtggcaatcactttgaggaacttttccagagggtataaggaaaggacaaacaaatgaaatatagaaatgatagaaaaagtgaaataaagagaagacattgtaatgttaatgtccataaaatagaaatacaagaagcattaaaaaataaataaatcaaggatagaaaatatttgaagaatattgtattcaaatatatcttataatttttgaaattataaaagcattaagaacccaaatttgagggtttcataaatggttaacaaaataaagaaaataatcctttacctagctacattattgcaaattttaggacataaaaggcaaagagaacaaaacaaaacattcaaggagggaaaaagaaacaagtattcaattgttatatttctcaccagttatggtggatacatgaagataatacgttactaaagaaaaagtgctttaaacctgggaatttatattttattaaaatataaaatattatttaaatgtgaaaatgaaacaaatttatttttagtttgaccacttaagatgtgctttgaaaataccattgaagatgggatatccataaaatggaatattattcagcaataaaaactcatgagttatcaagccacaagaaacatggaagaaccttaaatatacattcctaagtggcagaagccagtctgaaaaggctgtatgattgcagccccacgaccttctgggaaagggaagaccatagagacaataaaaaagatcagtggttgtcaaggattcagggactggttgaggatggagagggcagtggatggggagggaaatgggtagaacacagggcatattgagggcagtgaaactattttgtatgagactgttatggtggatacattgcatcatgcatttgtgaaaactcataaaagtgcacaacaccgagagtgaaatctaatgtaaactatgacctttaattagtaataatgtatcagtgttggttcagcacttgtcacaagtgcaccacactaatgcaagatgtgaataatagggaaaaactcgggagggtgggggctgggggaaggtgtagaaggaatacatgagaactctgtgcttttggttcaacttttctataaatctaatactgtttaaaaaattaaagtctgttgattaaaaaaaattacaccccagaaagaaaatatatccaggagaacccaggaaaatatgggaagtatggatgagaaaactatcaaagctatcagtaaggtatattacttataaataaacaagaaacaaaagagaaaaagcattcacaaaacaatccagactaacaattctcaaagacagaaatgtggtgtggtgggaaaaatgggatggagagtgtgaacaaagtcatgatgagacctcacagaggcaaaaatgtactaggatacttgtcttgggggcaatataaaatcatgtatataatttaagggtaattaatacaagtgttcatttaatacagtgggaataactaaggaaaaatagaatttgagaatataattctcaaaccagaagaagaaaatttggtatgaccaatgaaaggaagaaaagaaaagaaggaaaaaaagaaaggaagaaaacatatagagaaggaatagaaagggaaagaggaagaaataaaggaaaaagggaagggaggaagaaagaagggagggaggttggaagagaggaaggaaggagggagggagagagggaaagccaaaacaggcgaggaatgatgagaaggatgggtagctgttctgtggattgtgtgagttaaggggaaggaagtggtgggacttaacatcagctccatatgctacagagtcaagtatcctcacatattcttacattttccctgaagttatatattgagagccagtggaagacatcgtagaaattccctggtctattttgtgaatgtgtcttgtagtacatagataattacatgtgagccattcctataaaaaggtttagattggtcaaggatgaaagaaaaagagacttgcaggtggaaaacaaaaagggcaataaattaaatctttcaaaataataattgctgaaaaatagtcatcttaagaacctcatataactactagtttaaaatattgccatccagttattgaaaaaagcaatttttcacatcaagaatttttatttatcttaaaatatttcagaggcaattggtgttatgctttagacacttgactgacagtaaaagtttactataataattcaaatgcctcttcaaagtggatgaacagaaacaaaacgttcagagaggtgagtgttaaattattattatttagtgggaaaatgacctgaactattttctttggttgctgttacataatccataatctgatatcagttccattttgttgtttgtatttgtgcttgaactttcaatacaatagaggtcactaatggaagcctaaaaaagaatttttatttgacttttggttcattagaagtttctttgttctagttattttccttagcagagtgaatttctctcactttctcactatttgtccaatttactacctaagcctggatgtttgtcttttcatactctggaaacatggacaaagacaaaacatagggagtttcgaggcattattcaataactacctagagaataatggctctattttatatgatctaacttggtcacttgaatgggtcatatttctccaatattcacagaaccacctaagttgtttttggttgtgtggacatagatcagattgcctttgaatcatgatttgtagatgtaaacactatttattagttgtaaaaactttatattatctttaacagcctggccaaaaggtcattattgtttaggccttctgccttccagaaagagtatgactaaaacagatgtattgggcagaatttccagaaataccccaccacccccaatttcacagggctaatatccagaatctgtgaatgtgatgtcttttcattcccatgattgtcttatgtgatatgacgtagttgaccctgaaagggtagggtattcctggcagacctaatctaatcacagaagctgttcaaagcagagaaatttctcgtgctagtgacagaagacgaaagcatcagggaaagtcagaggaattcaaagtgtataaaggacttgagctgttgctggtttgaatacagaggagccacatgagaaggaaggtgggtagccatgggttgctgagagagagattcacagctgagcatcagcaaaggaacctggagctcagacctagagccacaaagaactggattctgccaacaacctgaatgatcttgaaagtggtttcttcccccacattctccagattagagcccagtaagccatcaccttgactttgaccttgtgataacttgaccaaacctagctaagctggccaggacttctgacccacagaactgtgaaataatacatgggtgttgttttaagccattgagctctggtaatcagtaatatagaggcagacaataaatatagcatctaaaaccagtagtgtttattttgagatgtcaaagaggatcccattctggtgtttgatatttcagagtgccaggccatttttcctcacatcccactgacattcctcttgttttgatttaaatgaatagtctcccttagatgtcccagacaggattataagtctctttccttaaaagtttcagttgttaagatatgtagcataaaattgtatactataatggatcttgtaaatctaaccatttgctaaggtaacacaggttgtaggaagcaaatctggtactagaagccaagatgaaggattttcaacctagtgacctttctactcaaaagccatactggctctgaccttcatattttaattgatcaggcaaataatctcaaatcctccaactttgtttgattatttggctaattctgctcagaatcctctctaaatatctactggaggcagggacattaactgaatttgaaaagcaatattatggtaagactctctctaataataccataaaataccatagcaaggttgtttttaacagataattaaatgaagtccaaaggaaataactagcttgcccaaggttactctttgcaattgagaaaactgaggcttgaataggtgtaattattcattcaaatgtcctcggccagttcatggcagagatagaaagtcgatccacatctcttgatttccaattctttttttacactgagctatgtcaatatgtcaattctatagggtttgccctcagattagtttgagaaataaagtatattcacagcctctgtgttttcagtgtactaccagctgggatatctatgacttagttccaagctgtgatattctctgggactacaaatttttaagagccattttaaaattggctagaaggcaaatctagggtgcccataatgactgtacccagccctgctatgagtgactgcactgtgatttattccctactcagtgcccatcccccactccaaagccctacaggatttaggaaaaactgctggaagaaatgctacatcatgaaagcttaaaaaggctcagggaacaccacacttgaatcagtataggtgggactggtatatttcttttgctatttcattatccattttgcagttcttataaaaaatgagtctgttgatgtagtcttctgaagcattaagatatatgctatttctgcagtgaacaggctgcttagtgaagaagagtgtcggctcacttttgttctttcatatatttattagagtacgctttcccagagtgtcgattgcatgactttattgaagctagtttgaactcagactttcccccactgaatctgagatccactgaggcccagacaccaaggagctgttacacatgtataactattccattcacacctcttcaggagtttcaaacaagtttaattataagagaaacaaaagaaagcacttcttctttgccactgctaggaaaaaaaattgctttgcttggaaatcaattcattgtaagctttaatctgcctagttcggtttctcagaatgaatatttcaaatattaaatattttcttgagtagaatgtatagtacatattttatactaatatccatgtgtgtgttagacaattaagaagactggagtgttttccaaaaacttgaaaagttttcggtgactcgtaatacagaagtgacatttttatttgagaacaatttaccagattatgtcaagttcattattggtatgatactaattatccttaggataaattggaaaggggaaccctctgctagttttctgaagagctgcgtaagcctgatgaaatgtcttttctctttctgtgactcaaagctccagaaaaatctgcaaagttgaatatcacttgtgcctgctaatcttgtgtcatagttattttctatcactgtcataatgtcagagaagcactgggaaaatctgcacatcactcatctctccttcttcacccttatccaggtatatccacatatatccaaacatccagaaggtcacaggtgggatatttttgaagatgtactcacttcagcacaggtgaacctgttgatgacttccaggtctaaatatggtgaccttagtcacactggttatttttagggagcttcctctgactcttttataaactcaagatgataaatgcaatctacctgtaagattcttgagaaatttgtgttgtataatatgaccgtatatgatcccagtagttgtgtggaacttgataggaaccacagtaagtatcacctctccttgcttccatcattcccctactccaacagtttcatcttcctcttctgtttctagtgaataaaacatagtctgctgattttaaggtatattccattcccagttgtatacacaatggttaactttacattcgtgcaatcagtcagtcaacatttgagtgtgtactctatgtcagatgctgttttaggtgctaggggcccagcagtgaacaaaacaggccattgctgtgctggaagtaaaattctagttgggggagacataaaataaggaaataaataagtatataatataaggtaatatatacaaatgaaaaaaataaagcaggaaagagggtagggttttggggggaagaggatgttaaaaagttctaatggtctaggtatggctcattgacatagtgacctttgagcaaaatcgtgaaggtgaaggagctttactctttgaatcaggatgtcaggtcttagtttagactcttcagactagatcttagccattgtttatagatttgcttaaatgtctaattctttttcagctgattatgttggagtttattgttcctaatgaccaatatgctctaccaatgtcagaggcctgattgacttttgagggacaatgactgctccagtttatgcactttctctccccccagccctcccatccctcccatcctcctctgcctaccctccccaccccactcactttttggggttcctttgtcagctgtgtattatggcaaggatcgacattttcttgacattcattgtagagaaggtgatgtaatctctccttggagggtggtcacctgctgcttgcaggctgagctaaaagcagattctctcaatgacaggtatgactgcatttcctgggcaccttcagcaaacaaggctcttgcaacaatagcttgcgtcttattcttaattacttcataccccaaattaggtgggctaaatatctttttgttgtcacagaatggaaagcacatcataattagtgtaaaacaaatatcctcatagggtccaacatgcagtatcctaaaagaaaacgaagtaaacaatttatgtattttgtaatatacatggaatatgccattaggttgttttgcaaacccatgtaggtgatcctggtagattagatttacaatatatctttcctttcacttcattctctccatcctctatccattaatttttcttatatctagaaatagggcactaaagaaaactacagtatacagttcctgctttctctgaaatcaactattaacttcaggcaagtggaacacatacttggtacattacttttttttaaatccctgtattgcataatagaagagaatggtaatttttatcatgccattaatgtgattcctttctttattgcttaaagtgtcaatcagtcaaattgaaatgggttattactctgttatcttcttcattttaattatttggctctcccagcattacccttcattacctgttctccagaggatttgttttatctgaaaataatttactgcttaacatcgatgcatttttctgatatcgttaggtgggcctggtgttacatttagagagttaccgtcatcagagtaagaggaaatatatacagtgttttatcttgcagaacttaatgtaccaaatctgatgtcctataatgtttcagagggatgatacaaatcatttgcaactagaagctgaatattcagccttgtcacaagaattctcccttattcaattagattttttaggtgtttgctttaaaaagtaatatcagattagtaatggggaagcaatctttgaaatcattggtgggccaaaccatgataataagatacaaaagagaaatgaatggtgggaaatggcagacacattacacataaacattgttttgttatggcaaatctctacggcttctcaccacgatgtcagtacggaagtttgaaagaaaaatgtatgcgtctcccgtagagcccatgaacttgttttcttttgcatattatagaatctgcaggtatttttcaaatgaggaccacaaacattcaagtattaggttttcttacaatgacagccaatttagcaagcccaaggttttagagcatccttcaagaggcwggttccatttgcacgttcatgttcaattcgcaaagcaacagcagcagcctttacgtatcccacgattaacacttcaacctccagcccattttgtaaggttaggcattcatcaaaatgtcagaatgattacagtacagatctaaaatcccttttgtcagacactggactttaatccgctcttttctgtagtcacgtcctgtcacttttgcagctgacaattattgtttttggtcaaaaaattgtaccttgcaatcaaaatggcttgttatccaaattgatctctgatgctacaaaatgttgtttgtggacaattctcctgagcaccactctccctctcctccagagtttacagttgaaatggaagcaatagaaagtcaggagaacagggtggggctgaggcatgcctggtcttttcactgctaggcttggatgcctaggaaatttacctggaggcttctgagtaactgaacctctaaaagatattaaacgagactttttcactattttattcatagtttgtgcttacttttaagtgagcttttgttttggaattaaaccctgacagtcagtggcagctagaatcgccacctgtcaaaagtaaggtttccagtaaacaaaatatttacatatatcaagtgtgagagagactggggaaaaatttaatgggcaaacagaaattcatagaaggctacaaagtctttcttgaccagtctcacttgtaggtcttaagcctaagatgccatattacaggtggatcagcttcgggaggaaagcaagagctttctattggaagcaagcaaacccctctttgtgagtttctttgcatttgaggttctataaattttggagctaaaacagttagtcccttatttttgtttcactgaagctgctgaatgctaataggttattgatgatggttttatttgccagccatgaaaaatgcttggacaacaggacatgcatgacagttaatctttgtagagagaagatgagcatcagtggctgaattaggtgcggagggttgcagatgatatttaggaacacagtgacatcaagggagagggtagcccatggaactgctggccataaatagttttaggcatactaaaaatatcaggagaggataggagagactatgtggaattgctttacaagaatggcagcttcttaagaattataatgagatcagaaggtacaatgcttttcagtacttagaggtttttttctagatggaaataagcaaaagtagagaattaccagggtttacattttgtctccatcatttatagctaattgaacatgggagaaaacgtagcttccttctaaggctcagcttcctcaactggaaaattggactaaaaaagaaccatacttcagagttgttaacaggattaaatgagataatatatgtcaagtgcctagctcaatgtttggcacctcagcacatgctccagaagtggtatcaattattattacataacagagataatatttggtgggctatgtgtatttgtgagtgagagggagaaagataactgttttttttacgcatttttgtgaatgtataactttctcccaactcagctgaagcatccaccatggagagaagtgcttcaggactgttaccagagaaattgaatgagaaagagatgaaaccattttttaacatccctaatgggaattttcagtgaatggctagacagtaggcataaaagccaaactgtcatcagggaagagtctttatacaatcaattatcaagatgcctgatggataaactagaccacaagtcctgcaggaggacttgctgggatggataaagtaaggaggcagtaggtcatcccttctgttctgaggaatgtgagaggaggacaggaaggtaggaagggcaggagagtcttcctttgcagactgtatccaagactggaaagaaattttaaattagtaaaatgagataccagcagcaggaagaggaaccactttgctgaccaaccctatacccactgggtaaagggagacagagcatcaaagtgatcccagtgatgtcatgtagataggcacagagaaaatgttggtgcttagctttcttgagcatgcctgctaataactggcatggatgggactgaaaagttcctgggttgcctaaataaaatacaaaggtgataactgctaagctgtgccagtatgaaatgaaggcaggccaaggcctccacagagaaccaccagccctgattaaactataagagactggccaccagattccagcatcagatcccaggtagggcgccatacaggagagaacctacaccagggactggcatgatctcagactcccatagatttggaaaccctgtctgtccactaccctatcatctcaaaactcactacattctgtacactcagtgcaatctttgaggggaacagagaaaagagagaaaatgggaaatgatgggattaagctaaactgacatgatagactaatcctaatcctattccctccctattcacctctgtcatcaccagtgccacacagaaggtgggagtcatgagaaagacacaatgcattgtacataaaaggaaaaaagctgtgtcttcaccaactcgaaataggaaaaattgtgaccctgtgatgacaactattacagctgtcataataaaatcaagatgatggctgtatttctcaggcctcacatcaccttttcttttacaaattatttgaaatttaaagtagttttttctaattctgtgaagaaagtcaatggtagcttgatggggatagcattgaatctataaattactttgggcagtatggccattttcatgatattgactcttcctatctatgagcatgggatgtttttccatttgtttgtgtcctcttttatttccttgagcagtggtttgtagttctccttgaagaggttcttcacgtcccttgtaagttgtattcctaggtattttattctctttgaagcaattatgaatgggagctcactcatgatttggctctgtttgtctcttattggtatataggaatgcttgtgatttttgcacattgattttgtatcctgagactttgctgaagctgcttatcagcttaaggagattttggtctgagatgaaaaattcatcctgctaaaaatgcttgatctggtaagccaagtgctagagagactagaggagccaaggaacacgtaggtagggtgagataacagaagaatacccaagctgaattgaaaggaggaggtgcaaagaagcttgtgcattggattaggaaaaaatatagactttgaactcacaaggacttgatttttttccaatttgtcgtctcactctctgcataacctctattatgagttgaattttgagccccccaaccccccccaaaaaaagatgttgaagtcttaaatcccaacacctgtgaatgtgaccttaattggaaataaggtctttgcagatgatcatcttaagatgaggtgattaggatatatcctaataccacatgaatgtatctgtgtataaaggggaaatctgaacacagagacagacaagtccaaagaggatgaaggcagtgatcaaggtgatccagctacaagccaaggaacaccaaagattgccagcaaatcaacagaagccaggagagaggcctgaacagattctccctcacagcatgcaaaaggaacgaaccctgccaacaccttgatttcagacttctgacctctagagctgcaggatgataaatttctgttgtttaggccacccagtctgtagtgcttgtaatgtcagccccagcaaacaaatacagcctctcaactatgtctcatcggtaaattaattatttctccccaactcataccataaaatattttagacagcttgcacaagcccccaaacaaaaaaactgtgatgaaatggctaaatagtgtagtagccatggygtatacgaatataaacagaaacatcgtaacaggaaaaaataagaaagtccattagatgcagttgagcttccagcttgtctcttagtttcctggaaaccaaagtgaaaggaggtacctgtttggtcagaaaagttttagtattacaaaggaaatagcattgtatttctttaggggaagcaaaaactttttcttagccctaaattctacaggcagtgctgaattgctcagtaaacaatgcacttaatgatatttccttggcaaatttggtgaattatccatacactggtgtgtatgtataacatggtagtgcaacccccaacctgaaggtgacacttgtgcgcacgtaaatctctatttcttagagatgtcaaatcaaatcttataaacataagaaagctacataagcatcacaaaaaattacaaacagctatgcctcattttcataagtgatgtcctgactctatctgatctagttttcatgtaagtcctttgccactttacatctatcctcaaaagcctaacggaatctggctggataccccaggtgcttcctcaacgtagaagttttctcttgtttktttttttttttattctgagttattttgaatatatcagtcaattttaatctaaacttgcattatgttttcaaatacaatataagaatttaattaaaaacaatgcttcactgacagcagctctacaattctgtatttgacattgtagtacaacatgcaaaggcatgtattgaggtcagtctgaaatgaaacacttagcctctatattttttggaaaaacaaatccaaaatatgaaacattcagataggtaggcataacattcagatgtccagtgatggaggtcttgctttgaggggcaggctgtttcaggtataaataaatctctcaaagtctatttaggaaaaagatatatatatattcctgcaacttcttttgtttatttttattttttgtagagatggggtcttgctatgttgcccaggctgttctcgaattcctcacctcaagcaaccctcctgcctcagtctgccaaagtgctgggattacaggtctgtgccactgtgactggcctctgtaacttcttaattctgtctgcaggagccacatggaataatttatttagtgctttaaatatatatatatgtcactaagccattttaaggaagataatcagaaaataattatcaagctgttttgaccaatataattcagattctacttcaaaaaattacaagagattgcctgaattattttttatattaaaaacatagcaggcatatgttacacaatgagttttgttctgtctttcatttgttaatactttcttaggatgataatagaaaaaaaatttgagaatttatctttctctgtaccatcaaatctacagttttccgttgtttattctcagtcatttccattcccaatttaaatgttggatataataaccagccatattaaaggcccgattctatgaatagaaaacatgaaaaaaaatttaagcgaggatttgggagatggtggtaggtaactgaacttggtaataacaataaaatgatcccaatcagaggctgttgtgtgagcacagcctgtacaattaatagtgacacttcagcagcaaagccactccaagaatcataccatcgtttgccattttatatttctctccaagattttccagagaaatgccatcaaaagcacaaatactatttctaggattccaaactctaagaaacatattaattcagaagatgttaaagcatcaaaacagagaggaaaatgttggaatggttactatttatgactagcttctgctctctgcactgaagagcgtagctatttccttcattttacagttgacattcagaaaaagtacattaaaagtacccagaaaagccttatctctgcatatttttgcaatttggaaggacaaatagaaacaacattagaacttgatacatttagtcgtactctgtattgtagacttggagtggaaaaactgtattgtagactcggagtggaaaaaacacaaactgttttccctccgctctcacaccacaacaatcaacacagatgacttctgtgaccaaatgtgtagcagcttctccacaccaacaagcaataggcaatcaatcagttctgcagcagacaccagctgggtgtcatccagtttaattccaacacagcctggatggagatatcatcagatcccacagcttaaaggctcagtcccacaagaccaccgttcgcttcacatggcagtcacaggccctgggttgttttacatgcgcttctgaccaattgtctataaatcagggttcccatgaccccttccttgtgttcaatgaatttgctagagtagctaagagaactcagaaaaagacgtgactcagtttgttgtaaaggatattacagagtacagatgaaaagatacgtaaggaaagacatggggcaaaggatgtggagcttccctcctgggcacaccaccctccaggaacctccacacatttggctctccagcagttgtctgaacctagtcttttttgtgtttacagaggcttcattacgaaagcatgactgacaaaaccattggctattggtgagcaacttaactttcagcctgtctcccatccctggaggttgggggtgggactgaaaatcccaaccttctaattctgccttggtcatcttttggtgaccagtctccatcctaaagctacctaggggttgccagtcctcagtcaaatcattagaatatgaaaatatatcattttggaaaccctaagaattttaggattgtgtgccaggaaatgatgtcaaagaccagatacatgttttataatatcacagacacatgcataggttgtccaattttttctaagtgaagttaaaaagtatttcaaccccaattgtcctattcttcccttacatcattccttcctatacttctgtctaatgtaattaagaagaacatcgaggggaaacaacttttacttgatcagagaattaactgaactattcacttcccaagtgttcaactgaaaggtagattattttatctcatcattttaggattccttttcttaactgatttgttgtttatattgagtaaagtacaccaatattaagtagtacatcttgaaaatgttttacatatttaaaggtaatagctattgtattttctattaccctatattaattttgtctgtttatgagccaaaaatagattgttgcagaaaatatgtactctttgtatcttatttctttctctgagtaaaatgctttttattttcatctattttctttcacacagcagtactttatcttcttttatattccactaaatgtatgaaatgtatgttgttttttcactgtcatgttgatggagatatgggatgattccagccaagggctgttacaaataaagttgatataagcattcttgtatatgtcttttggtgggcatgcatactgatagaagtggaattgctataggtagatgtatatttagctttaattgatactgccagactcttgcaaaatagttgaactggtttatattctcactgacaatgtatgagagttccaggtgctccacatttaatattgtcagtatttttaattttagccattctagtggatgtaagttggtatcatattgtggtttttaatttgcatattcttgatgactaatgatgtttgggacattttcataggcctcaactgtttgaatatctttttagtgaagatgttctttcgattttttgccctttgaaaaattggtttgttcatctttcttattgatttggaggagttctgtttttttttgagacggagtctcactctataacccaggctggagtgcagtggtgcaatcttggctcactgcaagctccgtctcccaggttcacaccattctcctgcctcagcctcccgagtagctgggactacaggtgcctgccaccaggcccggctaattttttgtatttttagtacagacgggttttcaccatgttagccaggatggtctcaatctcctgacatcatgatctgctcgccttggcctcccaaacagcagggattacaggcatgagccagcgtgcctggcatggaggaattctttttatattctgcttacaggtactttgtaatgtatgtgtacaggtactgtgtaatatgtttttccactctatggcttgcctattcactttattaataatgtcttttgatgtacaaaatttctttatttggatagagcccaatttataatttccttttttgtgtttagttctttgtgtttgtttgttgaaactttgcttacctgccaaatcacaaagatatttttctactcttctagatggttggtgttttagttctgtgtttagatctgtatccacctggtatttacttttaattatgatatgcaacagggaccaaggtttttatttccacacagttgctatagtaccagataaccagtgctatagtaccatttattgaaaagactatccttttctcccattgatttgcagtggtgactatatcataaaccatatacctgtgggtctccaggtctatttctgtagtttattatgctcgtttggtctattctgttatctttactcattatcaaactcctccagcttcttgtacatgtttaagattgtctttgttattgtacattatttccatttttaaataaatttggaatcagattgacaacctcctccccatgcctaccccccaaaataaatcttctggggttttgaatgctattgcattaaaaccgtggatgagtttaagtttgttggaaattgacatcttaacaatatatcaagttctgcagcctattaacatggaataacatctgcatttagttagttcatttctttcactaatgtgttctattttggaatagatgtattatgcatgtttcattagatttattcctaagtatttgtttttgatgctatgctaaatggtatttttatctcactataattgttattattatatgaaattcatggatatgaaatacaattaatttttgtatgttggcctagccagcaaccttactaatttcccttattagtcattgtttctttagtattgtttatgaccatgttatgtgtaaataatgatagttttattttttcttgccaatttttgtacattttatttcctttccttgctttattgcaatgcttcattccagtataatgtggaatgggtgataatagacatccttgtcttgtccccaccatcagaaatgcactcagtctatggtatcatgttattaattctctagtgaaaccatagtttgtatttagtaaaacaacaatgtacatttggctatttcaagcttaattgaatttctttggcctctacatgattcttccttgctgaaaaggataatttataacaaatatttcattacttataaagcaaacacttgcatttcagaatacctttgtatttcactttcaactctagaaaatatttgttaggaaagtataatttatgaactgttataatgctttagtttctattcatttatttgggatttaccatgtattgctttaaattttaagcaatttttatatgaattgcttctactctacactatgaacacaaattcaaagatagcctgtatttgtattaaatttctttgaatctcttaaggcaactagcataatgccttgtctcaataaatatatgtttattgctttagagaaaacaagtccattactattttcaaagttgaaattgcgttatatgtttaagctgccatttaaacagcactacattttgccataattttgctatagttaacattccaagtatattcaaagttgatttttatttttttcagaaaaaatgccttagtctgtttggtattgctacaaaagaacacctgagactgagtaatttgtaagaaaagaagtttgtttagctcacagttctgcaggctgagaagttcaacggcatgaccctggcttctggcaggggcttttattctgcatcataacatgacagagaaggtcaaagaggatgcagacatgtgtgaagaggggaaagtttgctaggcatcttagccctgtaacaacccactctggtggaaactacccatttcctcaagaactaatttagtttagtcttgcgagagtgagaacttactaccagaagaacaacaccaagccattcatgaaggatctgccctcataacccaaacacctcccaataggccctacctccacactggggatcaaatttcaatatgagttttgatgagaacaaaccaaccatattcaaagcattgcaaaaagttgaaaaagctctactaatgtgtaaccagacatgtgaacatatataactttgagacatagcacaacacttaaaagccttcagaatcataaaaaatgtatctatcaatcttaatattttattaactcaaattatttttacctggctgcatggacatacaacatttaccctaaatttaaaatagaatgcaaattaatattcattggtattattttcattaattgcacaacatagtgaaaataatgttaacatttttttcctttccttcttccttcttctcttttgctttttttcttacctgtaaattaactgagttgccagatatccatagttatcaatggcaatttggaggctctcagaggcagaagtggttggtgtttttctatttattgttctagatttgggtctgagcacttttataagtgaaactttccaggtattttgttgttgttgttgttgttatatcaggtcttaaactatacctttataaattcttagtcatatatactaaagggcatttaatctcacgactgttatttatgggctttaagtcctctatgcaaagggtaaaattgtccctgtgaatttcagaggtagacattaggtaaagagagagttttttgcttgacttattgcttaagtcagagcgttctctgaatcttctaactcttcatttaattcacttgaaagtatttattaatcaatgtgcctaatacatagatgggactgcttccagtgagtctgtcagtcatgttaccagagcctttatttcttcctctatgccaagcttaaaaaatcagatgatttattttacatgagccacacatgcaaatagacctgtaatgctgaaattttgatacttaaaggtaaatctagtatcagagagctctattaagtggtctagagtatattcaaattacaagacatgcaacttattctaaaatctaatgcaatctactaacagcaagggagagggaactattcagagtaaataggacattgtttatctgaaattttattgacacattaattgacaactccattttatatgacgtatacaatcaactggacctgtttaatgttagtccttagataaaaaataattgtagctcaagacctcataattgtatatatttttttcactgtacctggtacaatcatttcatgtatgaaatgaatgagtccacaatacctcaatatttgaacattttgttttaattcacttaatcattgaaccacagagtctgtgctaaatgctattatctctataactcaacaataaggagatttaacagactcaccatttaatgtgcacgggagcacagatttcaaaatttgtttcagcacaaccttttggattatcatatatttgtaccataaaataaatcatctgattttttactctactgagacggatgcatatgcaacatatttatgtgcatatattcagtgttggaaattaattcataatcatgtatatcaagtgatttggatatttacctgcaccccatctcagggaatcattagagcttgcatttggaacatttaactgattttagttatgtaatgtaattttacacacattaccttacatttcccttcaaattccttctgaatcacactgttctgatttcctggaaacgcagttcaagaaatggccaagagtagaaggatgttataagacattgagtttcgaagttttcctttaaaatacaaaaagtgaaaattccacaaaagtggaatgaaacttgatttatagtgccgcaaagaaaaatcctggaatgtgcaggaaaggaagtgaatgaacttgggaacagctgcaagtaagtatgatgaacgactctgcattgggctagcagttcatctgttccacttgcagctgcaggccaaagcgtcaccaggttttctgcagaaactcaacttggcattttaatggctgaggtgaacccactggtggccagctgctgggactgaaaatcagaagcagctccagtccttccagattgtgaggggaaaggttaaggagagggaagtggtgccttgtcccagacagacgcccattggtcctgagatttcaaaaacaccaggagagagaatgcctggcagtggagaaaccaacactcagccttctctggaagaaagaaaaggcttgaggcaggattctcaagcttcatttaattacgatcaaatagggactggcagaagagcgtagctgcagatttgcagtaactctccctaaaagaacatgagctgtgagagagtgaccttgcagccagcactgatttgacattcacctgtttccctgcttgcattggaataccgctgggttagtttggatcccaaacatagaaaagtaactcctagcaggaggcagaagagagcacttaacattatgcggccaagaggttacactggctgctgcctcttatcaatgggtctttcaggtcctttttgggagcaatcctgggcttcattgccctgcctaaactgtagtttccaagcagtttctcaggcagttcctgttacattctgtgatcctgcctaatacagtaatttgattccagttgaaaacttccattacatacatgtcttgaatcgggagagttagagccttatactttgttcctctgcaaaactgtaagagcatcactgctgtattaaagggaagtgagtggaaagttgcaaagtgagcctttgagttcaagaaaacagatgaaaatgagcccaagccttggaactacagttctaagttttgagtggtggacagagtgggaaaccacgtagcatgcaaaggggagcggaagggcagaggaaggaagcaaggctacagtgtttggctgtgttctaatgtgctctggcatggagttatcgtgagtggaactaatattacataacactatgtatattttggaagatggctgggaaatagcctttggagccaatggagatttattaaataaaaattacctcaagcttgatttttcatctttaccaagcaccatagtaaattggcatctctgagactcctgcgggagccagaaagctggaatcaaaaattcagaaacatgaaatcaagaaagaactgaaaatctgaatggaaagccagtcacaaaagaataagaagtaaaatattctttaattatgtattatctcctacagatcaaaaggaactttccaccatttcattgaacctgtgagtgaaaatgatcccaaaagtatagagaaaataaagaacagtaagcaaattaattcagtttatatactgtcttttaacctgtttagaaagaatttgagaattgtttgatcctgattatataaaaaagatatatctgtatctatgtctacgtatatattaatacatacaaataaaatttctagaaggaagagtacacaattaacagtggttacttctgaagaatgggaatgggatgttggaggagacagatctgtcacttttcattttatatttctctggtgagatcaagggagcatcttactttgtaaatattaaaaatgctgaaatatgtaggttaaaatgtaattaatctacattcctatttttcagaattaatctgacttaccatctggtcatttttgcttgcttacattttttcttttgcaaaactcattatgttgttttgctaaaaacaattaaaacaatgcatcaaactagtaagaaaaaaaaagtctcaaaccacagagaaagactcacaattaccattagatacataaaattctatgatatatttctttgtacatttctggatcaaataatggcaagatggatgaactgatggatagatggatatatagacatgcatcgatgtaggcagacagtaagatcatagtataattgatattttaatttaacagaaggttaaaactgaaattttgcttttagaggaactattgacctcaaataaatgttttattttcaccttaagacgtatctttttctaaaagatccaaagttaacttgaaaaacatggaagtcgatttttttttttttttttattttaacctatcaagctcaattgactccctctcataaaagtggaggcacagtggctcacgcctgtaatccccgcactctgggaggccgaggcgggcggatcacgaggtcaggagatcgagaccatcctggctaacaaggtgaaatcccgtctctagtaaaaaatacaaaaaattagccgggcctggtggcgggcgcctgtagtcccagctactcggggctgaggcaggagaatggcgtgaacccgggaggcggagcttgcagtgagccgagatcccgccgctgcattacggcctggccgagagagcgagactccgtctaaaaaaaaaaaaaaaaaaagtgaagatattgccacaggtctcaggtcctctttccctgcttcactttctattagttttatcagttaggtttacatttactaagtttagagcatatacaatctttttttctttttttttttttgagacggagtctcgctctgtcgcccaggctggagtgcagcggcaggatctcgactcactgcaagctccgcctaccagattcacgccattctcctgcctcagaccccggagtagccgggactacaggcgcctgtgcaatctctatggtaaccacatttcccagttgactactaccggtaataaaatcaaatggattcagtgctcacaactcttcagtctttgggctactttccattcttgaatttttagctgaattcatctctttggctggattttgtggtaaagtagttttttgcttattttttcccccaagaagggcttacatgggtctttttctatgaattattttcctacttgacaatatttacttgttacttttttactttcatcatgccttgggcgcatataatactctcccttcacattttctttccttgaatttgtggagaattttccattttattcttgcagtcaactttactgaaaacaaatctgaaataaaattaatgttattctaccgtataggcgattggctttttagtcccaagatgcctaaaaataagttacccttaacacataatagcttaacttagttaggtctagaaattgagggtttgttttgtaccacattttctagaaagagtgctccttcaacctaaagatttacttagctttttttcaggaaatttcttggattagatcttagaataaatatttattttcatttgttaaattctctacttcaggaatatctgttaacattgtgttggatttttttgtttaaagtattcacttttctctaattgcttttatctccttatctgttcatcttccttcactataattatcttaatccccatttctctgtatcagtaacttaattttcaattgcatccattgtttttctaatttatgtattagtttcataaggctattgttttgagttctttcccccttatatcggtactctcctttatcatctaattctgttattctattattttgtctttgaattttgttttagtgaacttacattcctctattatattacattatattagaattagtagttttgagtaggttggttcatgagtttgtgagtagggtagtttcaagtagggttgagtagtatttttatgtttcttgtgataattttgccaaacaatgaatatttctttttagtataaagatgtctcatggaatatttaggacatgtatatgctaaaatttatttgttgcttatatgaatttcaaattgagctgggtgtctctatttttatattttaatttgctaaatctgtatgttttttataaatttccttccttccctccttccttccttccttccttccttccttccttccttccttccttccttccttccctccctccctccctccctaatctaggaggattttatagttgccatagcgttttcttttctttttgctcatgcttgtgtgtccctaagatgccaagttaggtgggatatattgtaggtggcctcttgactctcttctcaccatactgtttgttttctttacttaatatacagtctgagaactgaatttactttcatggattatctgtttgtctgtaatctatgggaatactgggtgatgaaggcagggatctagtcttagatactctgcagccttttctctgtctcctaagatattttttctgtgcaatgggagaggggtttttgtccaatcccctgggaaatactataaatgaataatttctcaaatttgctgtgtattcttgaatcttcactctcttcaaagagacttaagccactatttcattccgggtaggagcagctaaactaaactaacagaaaagctacaaattacagtggcttaaaaaacaaaggacatttttcttgcttgggtaaagtttcatttatttttccctctatttcattgccatgacttttagggagcagtgacttctaaattgtggttcttaatcaactagagtttatagtttgtctaacattttaaaaatataatcagtttctttactactatttttatattactaattcattaattttcacccaaatctttaagaacatggctctcatggttagggaaagaaaattgcgcaaaggacttgtgtccataccgtttttttggcctcactattcctgaatgtggtttctttcttctaatgaccaaactttaggggactaggactgtgcatctcagaattaaactggtatttctgatatgtatggtttatggttcaatggaaaaatataagaatttttcaaataattttctgattgtaaggatgaatgtgacctaatgttaaaatggcaggacagaaatattaaagaactgaatgatggcatcagctcagccatttagtatttgattttggacttagtttcctcatctgtataataagagctttgcctatgtatttttccaagaccatttcagggttttgcattattttatttcatttggaattaacattcaggtcatcttatagtagtgtactgaataactgaatgttaaatgtcttgctaaaataaatattgggttggtgaagttgaagttttggaataatagctaaaattaataactatagattttaattaatgatttcattcactaactttcaaaagttagacattcaaaaactgcaagaagaatattttttcaagattataaattgctagattcttcctgcagtggaaaggggaacatgagatatttgcagtattaaatagatactcactttcaattgatacatttaataacatcactaaccttcctattcatagtgaaatgagtgatgaaaaagttttttagtaaatattttttactggaacagaaataattttgtagcaggattcataatttgtgtatactgatttaagaatatcattacttcctgaaagtggcattcatctctatgggtagtcattttaacaaggtttttgttaaaaccttccccttcattaacacactttaggaaagtgtcttctaagtcattctatcaaagtctgttgctttcaaatttgattaaagaaaacaaagtattatttgcgtacctcatttttctctaacacatttttctttgcatttctcatattctggattatgtggggatcaaatatgatttaaatgttatgcacaattttgtggtttttcctactaatgaaattttgagttgcaaagttaacattctgccattgttaatatattcttattataaaaagacaaaatttcaacacatttcatttaaagatctcaattggcttttacttgcaattccagaatcgggcagccattagaaccaaaacagttctgaggagctcccaggctgcaatgtggtgcgaaatgttttatggacagaaaatggaaatgaggtgcagaaattggaggtgagattcagagatagctgattggttacagctcagcctttgccttgtttgaacatggtttgaacagttgattgactgaagctaggctgctgtgattggctgatactttactatttgttacaaaggcaaattcctaatttaagctttcaaattgtttaagtactaagttaggttttactttgttacttaggactcatatcgaggtttctaaagcccacatctgatacgatttaacattacctatgtgaagaattactaagcagaaacattttgaaagcctcatgacctgaatcgtattaaatacttaacaattgaatttgtctcaataataattatgtttaaaattatgaatgctggtttgtaaaaaaaaaagccacaaattttaaaattctgatataatctaatatctggtattcagctttgtattatcattttaaaatttaatgaacatctctggactctaaatatttttctttttaaagttatataaaacattctctttatattcattataactattaaactatttgcctacttatttatattgaaagtccttaatatttttacaataatttaataggtttcacaatcatcattacttattatagtttatactgtttgaataataaatatatgtctatactatgactcattgatacatttcaaaatacagtgcacataagaagatcttcattctctagatctgtcatactacatatgtgaaagttaacatttgtagtggcagtgaatcctaggggcagccttgcatgttaatgttatgtggttgatttgagaggatggggatctgtgtaatcatatgatgacaatttgggtttgggaatctcagaaatgccatcagtataggaatatggctattctgctcttcctaggctaagaataaacttgaagacaaagagtagattttggccagacactgatgctaaagtcaccccgatgctgtctttgcttctaaggtataaattaccttattttaagcaactttttcaccttttcaactctatccctttcctcagcctctttcatatgtgaaataaaatattcacttactactgaggatgattttttttaaacctattaaagaatactccatagctacagaggggaccatatcctttagagactccgttggggatgatcatatgcagaattattcttgtccctttgcctctgcttaatccccttcacaaagtctgtggctcaaacaaatgagagttggcagtactaaaggaataagttcccagcatacgtctgccatgctttagcatcatttcagattagaagcatggagcaaaggcagggagacgggtcaaacaaaatgctgagagcttccctccttttaaaaaacaaaattctagtcagggaattatttttaaataaaatgcaagcccccaagacataaataaacagccagcatataatactaacaactcaatgaaagatacttccccaggtcaactcatctggtaggatcagttattttgtgttactgcattgcccctctagcgggatcatagaagaccctaaaggctacaagaagaactgctttctggctctcaagtcatttcagtggttccctgatggcagctgtctctttggggaggtggtgccgtggtctgtttggggttaggccatcagcacaggccccttgtgctagcatcacattgtcataagctttctgctaccatggctaccatccatcaccaggctctgtctccatgggcagcagcctctgtgcccaggccaccccaggacctcaggcccatctctctttccaaaggtaggtaggtggccttttcccattctttagtttttgactttgtataactgaagcttctcctgggatgatgcaggcagctgctgcacagtcactccagacttactcttcactttgttgttaggcccctgcagctcgctgcacgtgactggtgccatctgccctccccgcacgggcagctgcccctcccacactgcctatttccccctttctgctttttgtagccacatgtctaaagatggcaggccagtctctgtggtctattttatgggactttcatttataactaggcagcaacccacattagttatttatcctgatgatctccctcctcttgccccccatgacaggccccagtgtgtgttgttcccctccctgtgtccatgtgttcttattgttcagctcctacttataagtgagaacgtgtggtatttggttttctgttcctgcattagtttgctgaggataatggcttccagctccatccatgtccctgcaaaggacatgatctcattccttttaatggctgcatagtattccatggtgtatatgtagcacattttctttatccagcctatcattgatgggcatttgggtggattccatgtctttgctatcgtgactagtgctgcagtgaacatacacgtgcatgtatctttgtaataaaatgatttatatcttggggggtagatacccagtaatgggattgctgggtcaaatgatatttctggttttagatatcacaacaccatcttccacaatgattgaactggtttacattcccaccaacattgtaaaagcattcctatttctccccaacttgccagcacctgtcatttcttgactttttaataatctccattctaattggcatgagatagtatctcattgtggttttgatttgcatttctctagtgatcagtgaggttgaacttttttcatatgtttgttagctgcatgaatgtcttcttttttttttcttttattttcttttttttgagacaaagtctcacagtgtcgttcaggctggagtggtgcagtggcaccatcttagctcaccgcaatctccaccttccagcttcaagcaattctcctgcctcagcctccgaagtagctgggattataggcacctgccactatgcccagatacttttttcgtatttttagtagagatggggtttcaccatattagctaggctgatctcaagctcctgacctcaggtgatccacctgcctcagcctcccaaagtgctggggttacaggcatgagctgcctcactcagccatgaatatcttcttttgagaagtgtctgttcatgtcctttgcccacaattgtattgttagtttttttcttgtgaatgtgtttaagttccttgtagattctgggtgttagacctttgtcagatggatagattgaaaaaattttctcccactgtgtaggttacctgttcactctaatgaaaatttcttttgctgtgcagaagctctttagtttaattagatctcatttttaaatttctgcttttgttgcaactgctgttggcaattttgtcatgaaatctttgtgcccatgtcctaaatggtattgcctagattttctagggtttttatagttttggggtttacatgtaagtctttattccatcttgagttaatttttgtgtaaggtgtaaggaaggggtacagtttcaattttctgcatatggctagccagttcttccagcaccatttattaagtagggtatcctttccccattgcttgtttttgtcaggtttgtcaaagatcagatggttgtggatgtgcagtctattttttttttttttttttttggagacagagtctcgctcttctgcccaggctggagtgcagtggcaggatcttggctcactgcaagctccacctcccgggtttacaccattctcctgcctcagcctcccgagtagatgggactacaggcacccaccaccatgcctggagatgtgcagtcttatttctgagttctctattctgttccattggtctatgtgtctgtttttgtactagtaccatgctgttttggttacagtagctttgtaatatagtttgaagttgtatagcatgatgcctccaggtttgctctttttgcttaggatagtcttggctgtatgagctcttttgtagttttatataaattttaaagtagtttcttctaattctatgaagaatgtcaattgtattttaatggaaatagtattgaatctataaattactttgggtgttatggctattttcacagtattgattcttcctatccatgattatggaatgtttttccatttgtttgtgtcctctcttttttccttgaacattggtttgtagttgtccttgaagaggtccttcacttcccttgttagctgtattcctagatattttattatctttatagcaattgtgaataggagttcatattcattatttggctctctgcttgttattgttggtgtatagaatgcttgtgacttttgcacattgattttgtgtcctgagactttgctgaagttgcctatcagcttaagaagcttttgagctgagacaatggagttttccagatatagggtcatgtcatctacagacaaagacaatttgacttcctttcttcctatttgaatatcacttatttctttctctttgcctgattgctctggccataactttgaatactatgttgaataggagtgttgagagatggcttccttgtcttgtgttggttttcaaggggaatgattccagcttttgcctattcagtatgatattggctgtaggtttgttataaatggctcttattattttgaggtatgttccttcaaaacctagtttattgagagtttttaacatgaagggatgttgaattttattgaaggccttttctgcttctattgaaataatcatgtggtttttgtcattggttctgtttatgtgatgaattatgtttattgatttgcatatgttgaacaagccttgcataccaacaattaagccaactttatcatggtggataagctttttgatgtactgctggattcagtttgccagtattttattgaaaatttttgcatcaatgttcatcagggttattggcctgaagttttctttttttgctgttatctcttccgggtttggtatcaggatgatgctgccctcatgaaatgagttagggaggagtccctctttcaattgtttggaatagtttcagaagaaagtgtatcagtttctctttgtacctctgatagaattcagctgtagaccagtctattcctgggcattatttggttggtaggctatttattactgcctcaatttcagagcttgttattggtctactcaagaattcaacttcttactggttcagtcttgggagggtgtatgtatccaggaatttatgcatttcttctagattttctagtttatttgcatagaggtgttaatagtatcctctgatggttgtttgtatttctgtggggtcagtggtgatatccctttatcatttttcattgtgtctatttgattttctctcttttcttctttattagtctagctagtggtctatttttaattttttttttcaaaaaaacagctcctggattcattgactatttttaaaggttttttgtgtctttattgccttcagttctgctctgagcttggttatttcttgtcttctgctagctttgtggtttgtttactcttggttctctagatcctttagttgtggtgttaggatgtcaatttgagatttttctagcttttcaatgtgggcatttagtggtatacatttccctcttaacactgctttagctgtgtcccagatattctgatatgttgtctgtttgttctcactcatttcaaagaacttcttgatttctgccttaatttcattatctacccaggtgtcattcaggagcaggttgttcaatttcgatgtagttgtgtggttttgagtgagtttcttgagttctgatttgattgtgctgtggtctaagagactgtttgttgttatttcagttcttttgcatttgctgaggagtgatttactttcaattatttgatcatttttagagtaagtgacatgtggcaccgagaagaatgtatattctgttgttttggggtggagagttctatcgatatctatcaagtccacttgatccagagctgagttcaagttctgattatctttgttaattttctgtcttgatgatctgcctaatattgacagtggggtgttaaagtatccccacaattattgtgtgggagtctaagtctctttgtatgtctcaacttgctatatgaatcagggtgctcctgtattgggtgcataaatatttaggatagttaacttttcttgttgtccccttcaccattatgtaatgcctgcccttatttgtcttttttgatctttgttggtttaaagtctgttttgtcagaaactaggatttcaacccctgcttttttctgttttccacttgcttggtaaattttcctccatccctttattttgggtctctgtgcagctttacatgtgagatgggtctctttaatacagcacactgatgaatcttgactctttatccagctttccattcttttagttggggcatttagcccatttacatttaagggtaatattgttatgtgtgaatttgatcctgtcattatgatgctagctggttatttgcagacttttttgatgaagttgcttcatagtgtcattagtctgtgtactccactgtgtttttatagtggctggtaacaggttttcacttccatatttagtgcttccttcaggaactcttgcaaggcaggcctggtggtgacaaactccctcagcatttgcttatctgaaaaggattttatttctcctttacttatgaagcttagtttgaccagatatgacattgtaggttggaaattcttttcttcaagaatgttgactattgccccaatctcttctggctttttgggtttctgctgagaggtctgctgttagtctgatgggcttttcttcataagtgacctggcctttttctctggctacctttgacgtatttttcttcattttgacattgaagaatctaatgactatgtgtcttggggttgttcttctcatggagtatcttactggggttctctggatttcctgagtttaaatgttgccctttcttgctaggttggggaagttctcctgggtgataccctaaagtatattttccaacttgattctgttcttcctgtttctttcaggtaccccagtcagcggtaggttcagtcttttaacataatcccatagttcacagaggttttgttcattccttttcattcttttttctctaatcttggctgcctgctttatttcggcaagatagtcttcaagctctgatatcctttttttccacttggtctattcagttattgatactcgtggttgcattgtgaagttctcatgttatgttttttcagctccatcaggtcatttctgtcctctctgagctggtgattttggttaacagctcctgtaatattttatcatggttcttagcttctttgcaatggattaggacatacttctttagctcagtgaagtttgttattacccatcttctgaagcctacttctgtcaattcatccatctcagcctcagctcagttcagggcccttactggagatatgttatgatcatttgaaggagaagaggcactctggctttttgagttttcaatgtttttgcattgattctttctcatctgcatgggtttatttacctttgatctttgaggctgctgacctttggatgaggtttttatgggttctttttaattgatattgttgtcctggctttctgtttgtttttcttttagcagtcaggaccttcttacatagggctgcagccatttgctgggggtccacttcagaccctattcacctggggtcctcccacacctggaggaatcaccagtggaggctgcacaacagcaaagatggcagagtgctccttttccccaagaggagcaccaacctgatgctggccagagtgctcctgtatgaggtgtatggagacccctgttgggaagtctcaccgactcaggaggaacaggatcagggacccgcttaaataaacagcctggcttcctcttggcggagagggtgtcctgcactcaggagaatccgcctcatcagggctgccctgactctccagagctggcaggcagaaaagagtaagattgttgattcacgataccgcagccgcccctcctcctatgggctcctttcagggagatcagagttctgttcataaacccctggctagggatgctgaaaatcccacagggaggccccacgcaggtaggaggaatgggtcaaggttctgcttaaagaagcagtctggccaggaactgtccacagctgctgtgctgcgctgtggggaattgctcccgttccaaactgcccagtctcgctggcacctgcagcagggaaaaacggctgactggagcagcagtggtggtagccaccccttcccccaccgaactcggtcttcttaggctgtctccaacctgctacactggctgacagggattccaaagtgggtttcagtttgtagggttccaagggagcagggccgctgagcaaggccgcttggctccctagcttcagcccccttcccacaggagtggacggatctcctgcctccttagttttcccagagctagagtatgcaaaaactcttatgtctcagtgtctgcccaagtggtcgcccacctgagcagccgctgtgagcctgcacagctctgtgttttggacccaaggcccttggtggtgtgggctcacaagggcgtgggttgcagagatccatgggaaaagcgtgcttttcagagctgggtagcacaatacctcaccagcttcctcggctcagagagggagcaccttttgccgcacgcaggctccgggtgggccctcgctccaccctgcttttcctcactgtctgtgggttgcgccaaccatctagtcagtcccaattagagaacctgggtacctcaattgaagatgcagaatttacttgctctttttgttcttggtggaagctgcagactggagctgtttctatttggccatcttggctcaaggttcagtttgagtttctgttgcagacactgcaagaaacagaaccgaatgaacaagagatatgaaagtatgtatcatggcaataactgtttctgtttatttcttattttgttttattttgctttctaatagaattggaggaaataggaagtatttaaaaagtgtttaaatttaccatcaattattcctgtatagttctctatttttaaaaatatgcccccaagttttgaaattctgattcaatacggactttgaaaggatgtgaaatttgggagcacgtattgctgttactaagactgggggctgtgagagggcttggtgttcccccaagcagtcaggcttgcagagagaatttgtgtcctgctacggtcttttgtaaaggaagctagccccacctgttgttcaaattcattttgcttgcgtgaaagaggaatgctgtccctggaaacctctgtccaagtgcctgttttttctgttgtgggcagcattgcaaaagtgatctgtatcctctcagaaaaaggaaaaaaaaatcacatctaaaaatgttcaatgtcattacattgaacactgaccggacaagtaagctggaactgtatggttatattcacaaattctgggatgtttgttttggctttgtgttataattgcagctacgaaactaaaagtgaacaaattgctttctcatttaatttctttttatcatgtctaagtctcagtatttttatttgtagaattgtgttaataataatccacaggcttactatgaggaataaatcagatactgtacataaaacaaataggatatttgttgacatatagtattcattcaccagatgcttaatctttccttcctcttgtctatgttagcctgcgattgttattctagtgttggtctcaaataacttaaactgtcattagaattttgctttaattcatagggccaatagaggaggaggcaatggaaaaatcactaggtatgtttgcttagtctctcagatgctatagcacacaactctcagagacttggaaaaatggaaacacagagatgttgttttgtgttttgtttttgagcacagttcttatagtaaatgtgaatgtttactattatttctagggtttatgataaaagatggaaaagagaggctatactgatgaacgttgtcaacatgggggcttgtcagaaattaaacaaacttttaagaaagtaattgaatttaacaaacattattgagtaccttatctggcccaggcatggatcttaacctcaactcctcatcaagggtagaaagtagactcagtcaatgctaggcatggtggttcatgcctgttattccagtgcttttggaagccaaggcaggacgatcgcttgagaccaggagttcgagaccagcctgggccataaaccaagaccttatcgctacaaaatagaaaaaaaaaaaattagccggaaatggtggtgtgtgaatgtagtccaagctacttggggctgaggtgggaggattgcttgaaccgaagagtttgagcctgcagtgagccattatcacaccactgcactccagcctaggtgacagagccagatcctgtctcaaaaccagaaaacaacaaaacaaacagacaaaaaacagactctttctagtcatgactttattccagtgcttaccacctggtccttgccctcagagttcacaataaagggattctggtctgggaagaaagcaactttaaagaatttctatcatcattctcataataccaataaactccaaaaaagagcctaaagattttcaaatgaccttccttagaagttctagatcctagttgattacctgagcaaccatttgcctatgtgtatttcaatttaaattgtcataaacagctactcaaggaattgattaatctgaattcaaaaataacttttatttagtgaaagtcaaagcacattattgtgttttaaaaagtcaaatgttgccaactcatgacttagttaagcctggaatatgaatgtgcaattgaagcagacattggctgtatgcacaatgcctgctgtttttcttgctgttagtcattatatgttatgtcctttgtcaggttggaaacaaaagattaatttcatttggtaggcttttaaaaatgtgtttgtctggttgtgtgtgtgtgtgtatatgtatatatgcatatatacacatatatacacgtatgtatgtatatatatgtatgtatatatgtatatatgtatatacacacacacatatataaatttagttctgaaatttaggcatatatatatatatatatatatatatgaaatttaggcgcatatatatatatatatatgcgcctaaatttcagcactaaatattaaagtttaggcttaaagtaccaagatatttttttcagagatggattattttagcactaaaattcttctgagccttcagtattgctgagctttatttaggaaatactcagtgatagaagatgaatgcaaaaaaaattgattaaaaaccggagccttaaaaattgaattcccttcttactgttgatgttcttatattattttggtatctacataaatgattatttgaaaaaatttctgacatctgatgatgtgtaacatgccaaattaatttccgaatgttaaaaatcattttacttatggataacttcattatgtagaagctgactatctaatttgtaattatttttatagaaaaatggcaagtagaagcttatcatgggtgaagttaacaacaaaaggctaaaatttatttgtctctcttcagtctttttctcttcagtcaaagacaacttacacacaacaagatttctccttcttaattactacatttattatggtatttaccctgttcaaaaagccttagtgaggttccagctttgaataagatagagtaaacatactgtgccctgtctgtcctactgaatacaactatcaaacctggacaaaacacatgaattatattttcaaggactctgaaaagtgaattgtagcagacggactgagaaagaccagacctgaaaataaaacaaaaccaggcgtgagtttaccatgtttatcctctggaggaacccagctttgacttgggaagctcagaagtagacatcaacacaggcaggaagagcttcacctggcagtgacggtgacagcagctgagggtccccaggtttctaaagctctcaggacgagaaagtaggtcccaagataaggagcctaaagggcttttttctttctgtgtattccttcttggcctccaacatgggtacagtcacaagagcatgtaacagagaagaaggaatagacctaccattttctagataaagaattggaaagaggatccacaggtaaccaaaaagtaccagggaaatggcagagaaggaaaacctcaggagaccaacctcataagtggtatttattagtgcctgggctcaaatccaaattgtacatgaatatgtctggtcctagatagggtaccgaagactttgaaagtgaattttggtatatcattgcccagattccagactggctattgtgtgacacaacatacaggatatatctgaatagtgctcagaagagtttgaaaatgcaaatgatattaaaataaagatgaaaaagagaaagctggtcagaacttgtggacataacccttctggatctgttgcctgattaaaaaatagttgatattctcgaatgaattaaaacaagatttagagactgagcatggtagctcattcttgtaatccaagcactttgggagggcaaggcaagagaattgcttgcggccaggagtttgagaccagcttggccaacagtgagaccaggttgctaggaaaaagaaaaaataaaaaaataaaaagctgggcatagtggcatgtgcctgtagtcacagctacttgggaggcttaggcaggaggattacttgagctgaggatgtcgaggctgcagtgagcacatcactgcactccagcttgggtgatagagcaagacctaaaaattaaaaaaaacaaaaaacaagacttagagtctcataatattcagtaagtctagcatataatgaaaaattgctcagcatatgaagaactaggaaaatttcaacttgcatgggaaatccaacctacattaacactgagatgacagatcttggaattacctgactgactctaaagcagctgttattaaaatgttccaatgagtaagggcaaatctctttatatgaattgaaaggaagaaggtctcaacaaagaaataaaagaaatacagacattttatggtaactttagaactaaaaaacacaataactcaattaaaaaaaaactcattggaaggctccatgaaagtgacagaggaagaattggtgaatttgaagatagattgatagaaattatttcatatgaacaacacagagaaacatgatttcaaaaaaaatgaacatagcttcaggaagctgaaggacaacataaaaaggtctgatatgtatggctttgaaaatccagaaaggtagaaagagtgcagtgtgtgtgtgtgtgtgtgtgtgtgtgtatgaacatgtacacaaacgtatataaacacccttatgtttgaagaaataatggctgaaacatcccaaattagccaaatcacataaacctacagattcaaggacctcagaaaactcaaaataaacacaaataaatccatgcccaaagacatcataatgaaactgctgaaaactaaagacaaagagaaaccttgaaaaaagcctgaaaaaaaatgatatgttccttgtggagaaaaatctatttaaataacttcaaatttcttgtcaaatttcacagaagctaaaaagaaatcaaccaacattttttaaatgctggaggaaaagaactgtcaagtaaaaatattatatccaacaaaaacctcctcaggaattaaggcaaaataaagacattctcagattaaaaacaaaataagacaaaacaaaacaaaacaaaaacccaaagataccctctaaaaagtttgctgaagaaattcttcacacacaagaaaataaactgaagagcaagtttcatgaaagaacagcagaaatggtaactatataaataaatatagtacatatcatccttttcttgagttatttaaaacacttgagagtcaaaagcaaaaatatgacattggctgatacagtttttatccagtatgcatatttaatttaaatatctactataatataaaaggacctatatgatggtagtaggattcctgcattctacttgaaaaagtaaagtattgattctaaatataacatgaaaattaagcatgtatatagcaatccctggagcaaccaccaaaatttttttttgtatacacaaagagatacagtaaaaaacctgatatacttcggtggaatgctaaaaataatccaataacacaaaataagacagaaaagctaaaacagaggaataaaaatcagaaacaaccagcagaaaacaaataatgaaatggtagacttaaatccaagcatatctatacttgcattaaatgtaaatggtctaaagggccaatttaaaggctaatgattaccagaataaataaagaaaaatgtatgatgcagcaatatgctatgtacaaaaaatcactttaaaataatgacaaaggtatgcccaaagtaaaaaggtgggaactataaaccatgcaaacattaaataaaacaatactcaggttgctatatcaatattagacaaaatagacttcaaagcaaggaaaatgactgggaataaagatgacattaaataataataaaaagaacaatttactaagaagacataacaaccttaactatgtctgtagcaaacagcatagcatcaaaatacgtgaagtagaaactaacaaaaatgaaaggacaaacagaaatattcacaattatactttgaagattcaacagtactttctagaaaattgacagaactagtaaacagaaaatatgccttgatatagaaaagctgaaggaaaaaaccaactgactgaatatagttgatgtttttctcactctactccaaaacaatagaataggcattcttttcaagtgcacgtggaataatattacatttatgaagatagacctcattctaaataataaaacaaatttatggcaagttcatggaattgaagtcacacaaaatatgttttttgtccatagtgtaattaaattagaaataaatgacagatgccaggggaaaaaaattccgaacagtttgaaattcaacaatacacttctaaatactctacagtcaaagaagaagtgtcaaaaaaaaataaattatttcaaactgcatagaaatgaaagtacagcatatcaaatttgtggaatgtctgcaaagcaatgtttggaataaaatttattatgtaaaatgctcatgttatgagaaaataagttctcaaatcaataatataagcagccaccttaagaacttacataaagaaaagcaaaaaaaaaaaaaaaaaacacacacacacaaagcaatcagaagtaaaaataataaagagcatacatcaataaaactgaaatcagaaaaacagtagaacaaattaatgaaaccaacaggtggttcttgaaagagattaatcaaattgatgaacctcttgcaagactgacaggaacaaagataaaacacacaatatcagaaatggaagaatcaccactactgacaccatagcattaaaagcataagaaggttatgtgtttatttatgtataatagcaataaataattagcaagcacaacttaattagtaatttcacttaaaatagctttcagaatgtgaagcacttagacataaacctaacaaaacatgtacaagatatgtatgctaaaaactacaaaccctcatgaaaaaatcatagatgacctaaatgaatggagacatgtaccttgttcatggattaaaacactaaacttgttaagcatgttaattctactgagttgatctatagatttaatgcaactccagtcaaaatcacagtagaatattttgtagatatagacaagctagtgctaaaattcatatgaaaaggcaaaggaactagaacagccaaagcacttcttgaaagaaatggagaaattatgtgctcaattttaagaattattaaaaagcttcagtaatcaagagtctggtatcagagacgagatcagtgggtcccatagatcaatgggacataaatagacctgcataaatatgccaactcatctttaataaagatgcaaaagcaacttactgcagaaagggtaatgttctaacaaatagtaatggaacaataggaaacaattggtatacagaagaaaatgcaacctaatcctcacatattatgcaaaaagaagctcaaaatggatcgtagatttaaatgtaaaacacaaaattataaaatgtttagaagaaaatcttcatgacctagagttagggagtgagtttgggcatatctaagaagaaaatatatgtatatatttgataatttaaattggactttatacaaatttaaaacttttgctctgtaaaagacactataagagagtgaaaagataagctatagacagaaataaaatcttttcaaatttcatattcttcaaggggtttgcattcaagatatatttgaaaactcttaaaaatcaatggcaaaaatacaaagaacacgatttaaaagtgggcaaaagtcttgaacagattgtcgaccaaagtagatatggggaaggtaatcaaacagaactatgtgcaacatcattagcttaacttagggaaatgcaactaaaatgataatgccatagcactagaatgataattataaaaagaaaacaaaacgaaagaccctttcactaccaactgctggtaaggatgtggagcaactagacttcttatacgttgattatagggatacaaaatggcaaagctgcttgaaaaatgggttggcaatttctcagaaaggtgaacaaatgcttatcatatgacccatacatgccattccttagtatttatgctagcaaactttaaatttatgttcacaaaaaaccatatgtgaatatttatagtagctttgttcatatttgtcaaaaattgacaatcatcaaaatgccattcaacaggtgaatagaaaaacaaactgtggtatctgactacttcttgtcaattaaaaggaatgaattattgatttgtgcaacaacttggatgaatttcaaaggcattatacagaatgaaagaagtcaacctcaaaaagtttacctaccatatcatatagaatttcaacaaggcagagttatggtggaacgaaatcagtgagtgccaggggttggggtgggggaaaagtgtgactacaaggagatagcatgggaggttttgggggaactgatggagctgttccacatcttgattctcatggtgattatataaatctatgcatgtgatataattcataaaactatgatttatatgactataaattaattttaaaaataaaactagaagaaaaaagtcttcccaatgcttgactattgcttttagattatcctctaaactccatagcaggcaatgaatggcttccattctctggctacactcattttcccaacgtatttttttgcccagcattgttgtgaatctgttctcagtgtctcactcactttagtttttctctattccctaaagatccgagttataatatacaacctcaccaatgctgattatttgagaccagcagcatatctggagctggttaactgacagatgtgattggttggaactttacctaattcacccaaggcacatttggttttcaaagacttgaaaagggatcaatgttctcatctgtgaggttttaagacttttgtaggcgaggatgaatttcattctactgacaacctgaacgttttttcatgatttcaatacccctataaaaagataaaggcagctgggaatacttactctagaagaaatatggttgaaaggagaatataaaccattcacataaatggtaaataagtatttgtcatcttaactaaggatacaaaaaaaaggaagtgtgcatcaattataccatgatggattaattgtgctgtatggaaaaatttcctattaaggaaatttgtttaccttcctgaaaagtgtggctgaggttggtcacagagttgttctctagatctctttaaggatagattcctttttattttttaattgacaaaataaattttatttacttactgtgtacaacattgatgttttcaaatatatatacattatgaaatgactaaattttatcaaattaacatatgtattacattagatagttaccatttttgtggtgagaacactttacatttactcttttttttttaagaatacaatgtatcattaatgatagtcaccatggtacaataaatatctgtaatttattcctcctatctaactgaaattatgtatcctttaaccgacatcttcctaacacctccaatcagttcaatccaccattctgttctctcctatgagatcagcttttttagattctgagtatgagtgagatcatgcaatatttgtctttctgtgcctggattatttcacttaatacaatgtcctccaggctcatccatcttaattgcaaatgagaggatttccttctttattacagttgaatagtattttattttgtatatgtaacacatttcctttatccattcatccactgatggacactgaggttaatgtcatatcttgactattgtgaatggtgctgcagtaaacacggtaaacacggaagtgtaaaatatctctttgaaatacttatttcatatatatgtatgtatatatatgtatacatacatgtacatatatattcatacatatatgtatgtatatacatatgtacatgtatgtatgtatgaatatacatatatgcatgtatacatatatatgtatgaatatatatacatgtacatgaatatgaatatatgtacatgcatatgtacacatatatacatacatatatatatatatatatatatatatatatatatatatagtggtgggattgctggatcatatggtagttctgtttttaattttctgagaaaccttcacgctgttttccataatggttacactaatttccattcccaccagcaatgcacaagagtcccctttcctccacatcctcactagcacttgttatgttttgtctttttggtaaaagccattctaataggtgtgaggtgatatcgcattgtgacgttaatttgcgtttatccagtgattagtgatgttgagcatttttcatatgcccgatggccacttgtatgtctttttttgagaagtgtctattcagatattttgcccgttttttaatcgggttgttttgttgctgttgagttgtttgagttccttatatattttggatatgaaccccttatcaaatgtatattttacaaatatgttttcccataggatagatttttaaccgtttgggatggtttaagggaggccaaatggaaagcctaaaaaaagagcattctgtggctccatggtggattctggcatacttttttcaggatgctcttttccaggtcaatatttaaagaacttgaagaccgcaaagcttctgctcttgagatgagaaggagcttctcctccactaatgatctgaatttaacactggatcacttaaagccaggttcatttgcaaaatatttgctcagctttgatgctataaaagcctctccaaagctaaggaaaccctgagaaatggattattcatgtgactctgcagagcttggtatcaggcattgcttgtatttaatctttccctaagcattaacattctaagcttatgaaaaatttgtgacgtatgctaaatatattccatccagttatgatcagagtccagtcacctgagtgtaagatttctgccctttcagtgagaattgagagccctggtgaaggcagatagaaaagcccagaaacacttgttgttttatttatttttcattgagcctctggctaatttttgataaggtgtcacagatttaatcagttttagtttaaatagaagattgagaaatactatcttcttttcattaccattagaaagaaaccttaaagcttaattttgactgcatgaaatgatatctaacagcaaatatttgtaattggtgtattccagatacttgtagtgtaggaaatacaatattgttttctttaaaaggaaattgggtgtgtataaaacatcagaggaaacaaatttaaggcaagattctgaatgacagttctgtattctacaaacctttgctaatgaaagggaagatgatgattttcaatgtaggtcatggcctgaagtggagaatttctgaaattgtcattgcagaccctccaatcagcctgatctgtctctgcaacactcctgatgagctctgagccttctcagtgctatgagtatttacatcaggcagaggtgggttgggatccaaagcttacccaccctaatatgagtaagatgattctattacattcatcctagagagaatatccttcatagaaatagaggaagaaaaagcttgcatttggttaggaatatagattatgaagagcctccttatcytgaaagctgagataatatctgtatcatatgtggtaacaaaaaataaggttatttgtataaagaagttagcatataggaaggtatatagtaaagtgcttcataatggcaggaaggaaagaaatattgaaggaaaaatttaaaagacattgcgtcagttggtatctgtttttggcaagtaaacaaacaaaatatattttctcttttctgccagtagataggttaggaagcagctggaaggtaacatcgtgtctgacttctaggatatcacaccttcaatgagttattgttttattgttccttgggagcttccactgaacgtggtgttctgtcacttctgaaactctggggatttcttttcatgatagaaaattgacaactagtatttttttaatcatagaaggtaagaattgtgcttattgaccaaacatgtgatcaaaagtggttagaaagtctttagcaggtgtaccataaatgcctgccaccttcccatttccacacctccacagacagcttcttgtgaataccccctccacacatacccaaccatacatagtgttctctctgctaagaagaaaactgtatacagaccacatgacctcacctcactttcattctcctccgtacccaaagctgagactatggtggccagtcatttgtaagctgtctaggcacctttgacatggcattgtttgaaaagataagaggttatctttggggaatttggtatgaaggaacaaagcaatgagcagtgaagatgaaagtttatgtgacagaggctgagatagccatcatggggaatgatttaagctgaaattgtgggaaagtagaaagtatgactatgaataagtgtaatgtataacataaagacagatgatttataacacagagaaaatattacagatcagaaaatgaaaaagccaaaggggagagataagagagtggaatcgatttctgcgtaggtagagagtttaatataaagtagaatatggaatccttccatgttctccctcataaaattcacagaaacctcacgacttaccaaagatgccaagaggagcaggagatgctcttgtgtttcacccaaatatttgtttctcattttttttaatgaatgtgtgtattttctagaatgaatataaaggaatgcctcattcgtttatgtatttaaaatacgtcttgactaccaataatgtataacaacctctgctagactcaatgctaggtccagtgcatgcacttggaatccagggacccaacttggaagggctcacagtcttatgttaggagacagataaggaagcatatttatggggcacatgtgagattttgttacatgcatagaatgtgtagtgattaagtcagggtatttgagatgtccactactttgactatctgtcatttctatgtgttacatgctgtgatactgataaagacagggtatgtaaatgtgggagctcaaaggagggacatctaactccaacagtttgccagttgtggggaagaaagggtaaggaagtttcctcaaataattacatctgagcagaattatggcatgccagcaacctcagccaggtgaagggcaaagagaaacatttgcatgagagcctccagggaggtagagaatgcagtgttcaggaactacaacaacaacaacaacaacaaatcaagtattcctgggccacaagatgtgagagggggaatgatgggagatttgctggagggcagggggattcaaataaaagaccagcacacatgagctggtttgtgacctactacatagttttgacttgatccttacaacatagtattttaagttaaagagagagaagttcatatttgcagcggggaggtggataagtggttgttgagacattaaaatagtagagtttactggacttggaagacttagcactggacttggtaacttagtaccttgatttctggcatctcagtgagttgaggccacatgacaagtaggaggaagagcagttattatcaagagaatgcaaatgactgaaatgttgagttggggtttctatgggatatactggtagatagcagagtcagtagtaagatacaaataggtctgagacacaggagagaatctcaaaagggatattaagcttccatctctgtaagagccatatggttgggtagttggtttgctttgtgctatacaactatttgaagttctttacattttctttcctcctgttttttttttttttttttttttgaaacaagatcttgctctgttacccaggctggagtccagtggtgtgatcatagctcactgcagcctcaaactcctaggctcaagcgatcctcccacctcagccaactgagtagctgggactacaggcatgtgccaccatgccccattaattttttatttgtattttttttaaagacaggggtctcacggtgctggccagactggtctcaaactcctggcctcaagttatcctcccacctctacgttttcaaatctaaaaaaatagtttaggacgtattcaccttagagatttaagagtttatattttagcaagctgtaaagtccagaaatcaaattgtgagtgggcaaacaaaatcaaagcaagtttcatctcatttagaaatgtggaagaatgagaacccttagtttaccttgcttttgtgcatgcagagtgctagctgtaatgggttagcacaaaaagacaaaatcctaaatcacagtcactttgccataatttttaatagttatgttctctcatagttctatggatgacatgctcattatagacagtctgaaactgaggagaaccagggttcttcctacatgtttatgttgaatgtggagaaggtgaggttactgcttctgctgcccttttcagctcaacatttgatctggccaatgtggttagctatactgtgtctcctaccaccacacatactcagaaaactgtggtagtaaacatagaatgaacttccttaaaagtagaaaaccattcattggctaaggtacataagaataagaatgaatgatgaaaacattggtagaaatgctgatggaagaactgattgatgcagatctattttggagaccccttaactgccaggggacatgaattgcctggctggttgaattgactctagaaatgatgctctgtggccgctaagtctccatatttgaccaaaaggtgtgtgagggctgtgtccatttcatcacttgccatgagtcctcagggctagtcagaataccaggccgatacacgcttcacaagcatgtattgaatgagtgaatgagaaaatgaatacaataatattttcactagtagccatggattgaggataaaattaataagaagagcccccaggaagtccggattgagctttatgctctgggacactcttctgctcagctttgtggaataatttgcagcactagaaatggacttaacaaccaggatgagggggtcatgttttggggatcaaacctcttttcatcatgaaagctactgggtggcctctgacatgatgtgtttagttatcaaacatgtcagctaataccatggagagaacacatgtattaaaagtgacagacataacaagggtcaaagattaaaggtgaattgcaaagggctttttactgcatctctgttgttataacagtttctagagtaggttgaatacatgagcaaaaagaatgatgaggagtcatggtgagcagaagctctcttctcaggcaaagcaggaatttttttccccacattgagctaaatattctttaaatgctataaatgttactacatatctgtgctgtttgtgggacagcacaaacatatttgaaacattcagcagttctttctcattaacttccatttttctaattttcattggttatattttcctgattacagaagtagtattggctcattatcaaaaataaatgaatgaaaaaatatagacagttaaaatgtgatataatgtaatggcctaaatatgacattgttaactgtacattcctgcagttacaattgaagatggcattttatcccttaatcagatacaaagaactgttagaaaacttcctttttgcccaccactgcattgtatactgtggtatatatggaaattcccaatacagacatggaaatgataaataaacacaaggggaactctcacggcataactctgtgtctagcaggctaagataataccatgttgtgcagtggtggtaattagagcacatcacgtgactctgagtttttgagggcagtggtcaatatctttatctttgtatccccaagggtgttggctaaaatgttcagttagcactttgaatgagggaatgcttattgagtaaaaagtcaattacatgtgacaataaatgcagtaagaattagtcaagagaaagacaagtgtggcctgcagtcaccaacagaagctttaagctccaaggatacccaaatgcgtatgttaatcatgtgttattgttaaagcatttagatgatgatgtttggaagttgtgtgcaaaaccaggaaaaatttgaccaagttttggaagttcctttctgtttgatttatctgctgttatggtgttagggctattgctgttttatagatcagttctacactgtagtaattaactgggtaatgaagacaaaaagtatttagaaacactctgacatatcaagaaattagtgtcaccaacccagaggcttctctgtctcttcagcataatcttccatctcaggtatacctaaacttgggtgtttactgcctcaaaagcaagcatttcccttgaaaagcagatttcttcctttctttttttttttttttttttttttttttttttttttttttttttgagatgagtctcgctctgtcacccaggctggagtgcagtggcacaatcttggctcactgcaacctctgcctcccgggttcaagcaattctcctgcctcaacctcccgagttgctgggtctacaggcatatgccaccatgcctggctaatttttttgtatttttagtagagacggggtttcagtatattggccaggctggtctcaaactcctgacctcaggtgatccgcctgccttggcctcccaaagtgctgggattacagagagaagctccagcttttgcactagctgaatgttgttatacttcctcaaacatttgaggataaagacataatatgtgatagttttaggtgactttttgtgtgtaacatttgagctctgaggataataatatatctttctatataacacatttcaatatctatttaatgtgccagttgcaagaattttctgattgacattgatcattttcattcagaattaagtcatttccttctgggaattaatataatagatttattatatgcttatgggccttgtctaagctctcttctccacactgtttcttcaaatgtaattccattgaaaatctagctgctgttttagagattacagtaaggcaaagcatttctcagaagacaaatatagaacctaaagttactataatgacatttggcaaattatataatctgagttcattttttttctcttctctccctcctcccttgtcacaaagcctataggaaggtatactacatattttgacacttttttttttttttgctttcaatagctgtgttcttactcaccactttaaaataacgtctttcttatatcttttaactcagaggtatactcagagactggaagacttgaacggggactggctacccagatagagcccccttggtggtgttttccttggtgatatgatactgggccgtattccctcaggattgcagggtgagaactgtgtctttgctagcagactaggtaggagaggatccattcctcagaatcaggttcatgttaacatagttcacatattgtattaaatacaaaccagaatgccaagttttttatttacaatgagcaatatagctgttaaataggctatggcactcaagtcaacaacaattcacagactcctctccccatagagaagcaacatggggatccaaattgtaatcagaatgccaagttatcaatttataatgagaaatgcatctgtctgacgagaatgttgagttggcctgataaattcattgtctccctgtagattagtgacaggggatgccaaattttcggaaagttgcgagagaatatggctttaaaacaatgggaaggagttgatcttaatttctgtcttccaattaagatggttttaacattcccacctctacctggctggccttgccgagaaaacaatactgctttagtcaaacaatactgctttagtcgctgtgaccagtgtgggcaataaaatgtttattttctgcctttcctttttctttgcttttctcaaccaactacctctctccaaaaatgtgtatgacataattgattgggcttttgtctgtcatagtattgattcatcgagcctcaatcatatttcagccttccagccctagaattactcccatattattttttactggtgtctgggctatgttcatatgtgccaatcaaacatgtatagtttactgacctaacctcacatttgtttaatcatatcctttatttttaaattctgtaaatcaactcactgcagtccttggcactgaaaatacctctatttcttcactacatttcctgaagtggcaaaaatgccaagattatatgagacccagggggaaatatagtgttctctgcccctagtgtttaatgcaaattgaaactaaaataaggcttgctttgaaaaagtacaaaaataaattttaaaaaatgctaaaagctggattcttctcttttggagatggcaaagagatagtaaagttgataaagagatgatttgggaaatgcaggtactttttagcattagtgagtagactcatttctaacatctcctggaagtatttgtgaattggctccagaatcttttgctatcacctaccctacaattaactagggatatgcaatcaccaaatacagtttctgggacaccttcaaagatgtcagcttcttcaccataaagatggcaaaaagtagaataattacattctatctttgacctttgatgagaaatgatcagtttctttttctaatccaatatggcaagcacttctaattcgtgtgaatagatctctttatagacatagtgtgtttatatttaaatactaagataatctggaattctgaagctacaactgtataatgacattatacttggtcagctattgcttttcttttcccatttatttattttgcattgagtcctacactggtgaaaggcctggtgcgttgcattgagttctgcatgtttgaacttcacaaaggttcaaaggtgtgcacatggcctggaacgataaacatttgtcctaaagtcattcttcagcttctgacatagcttgtgatttaattgccacctcattaatatgggccactgggtgtgaatttgtcaaaacaagatacatcaggagagctgagtgaaatgtttcatgttcagaggtttttaccactcctgttccccactgcccatgttttgtaaacttttaacttcaagagactggtttaataaacatgccctgtcttctaggtcattgggttaaggatcatttcagtctttttgaacttttcacttttcctgtgtaagtataagctaagtacttattgggttctaaagctaaaagcctatgaagataaagggccttattgaaatagtgaagtgagcaaaatatctttatggttcctgaccttgtcctcctgggctttgtccttcttttaatgaatgacaccttaccctcaggttcccagtatttacacctttgtagtgtttttgcaattcagaaaaatgtatttgatagatgagtagggtgactgtcgtttacaataatctattttctatctcaaaatagctaaaagagaatagtttgaatgtttctagcattaacaaaagacaaacatttaaggtgatacatattccaattataccgacttgatctttacaagttatacaaatgtattaattcaccacgtgtagcccaaaaatatgtacaactattaagtatcaatttaaatttttttaaaaggacacagtgaaggaccatacttaaacttgattatttaattgctcatcatgaaattttatagggaaagaagaagaaaatcttcaataactcaaactcataagtaaagggacatacatggctgtatataaaggctatttataaagccctctatataaaagttatacatagcctataaaataaataaggatctgactttatattggtacctggcacaacacatgcattgcacacaggaaccactccataattacaattaaaattattatacacacaaatacatatttacttcttatcaaggtatcacatgttaatgctcacatgaagcagtatcaaaataccgccaatgagttgtagaagtctcttgctctattttcctcagtggcattctcactccctagtgaagtgtttttaattatttttatttttttatttttttactggctattttagactttctggtagagcactcaataatttctggatctgtcagagttaggcaatccactctgcaattggcaagatggggattttgctcatttatacttgactctccttcttctattaatcttctccttctatttatataactgtaacatagctgcaagctttaagtaaaacacgtaaagtcattttcttgttctgatgacttgcaatattttctctttattccccacgagatgaaatgaggatcttggtcccatacgctttccccaacttcttctcactcatttcaggccctacttctgtcaatcactctttctgtgtttagattgttgatatttgcacgttctgctaaaaatacaatcatctttgcccaaaggttaactttaaaagtagaacaataaacagtattaacattattatggccacataaaaatcatttaatgttaggtaaaaagtatgttaggattacatttttttaagagaccaatgtcatgacctctaactcactgaaaagaaaagattcctagcatttgagttcaaataaatgtttttttccttatatttagtcaattgcttaaaattaagctgcatttcttttatgtattctattttcctgcatcatatcttcatatatatttttttactctctatcatattatctagtctatttggtctgctttcccccactccaaatatatcccccttctagagtcgtctttctccctactccacactggacttacaactcctagacatcgtgctgcatcgctaatgtcctaagtttggtgttattggtgctatcaatcttcttggttagatctgatattttggtagcttcctattttttgaattatcctcttgttttattataatacatcctaaagtaacttcctaagagaaagcacacaggaggtaaatgttctgtttcttgcatactctcatatttgtgtgaccctttggccgacgatagaattctaggttgaaaagagttttcctttcgaaatttgaaagctctgctccattgttgttgatgagaagtcaagtactagttttattcctcctgtttccctttaaaaacttttaggagcatctcattattttaggtatttacatgttttcgatgacatacttgagaatcctttttgcacttattacaatatacactcaaggaaacttcttggtttatagattaatgtcttccattgagctatgggaaactttatttctatcttttctttaatatgttctcgcctccattttctctcttctctttctctgacttttaatatctggatgttagatcttccagacttatcctttctcatgacttctgtctttatactttagtcaaattagtgagagtccctttactgtgtttactccctctacttttctattttgtttattccaacaactgtgtttttagtttctaagtagtctttcttgctctctattttaattgtccttaccttctgtttttattttttggttataatagtttctccaatttgtgtaagtttattagagtatcttttgtctttgttcatttatttcttacactattcctgttttcatcttgcctgtcttagtctttatccataatattgccagatctcctaatatatttattattcttgctggtctatttgtatttaagggaaacaaaaatggcagactgcttttttttttatctaatagaactatttacacttaaaatctttatccttagtgagaactgtgggaatagaggaaacagagggaggggcaggtgatccaatatattaaagaggtgaaatttggcatcaatgagcctccaccataaaagaatgtgaaaattgctattcccagatgccaacatctaactaaagccttgcttttctactgggaattagttcaatttttttagagaagaacaaacaataatttttgttttgctttgttttggtttttggtttggggggttgcatgattattattttcttggatgattattattatttgcttgtaattgttcctgctgtttgtttcccaatatctcaaacggagatatttggctgcacaggagaacaacatatgtagctgtttcatacatggagcttacattgggttttgttttcagtcatatcttttatttctacccttggactccctgaagtttttgttattctttttatttctgccaaatctcccaccaatttcgtagtcaccttatagcatattttagactctggttttctgcctgttacgttttaaaatggagcagtaaacacaattatgaccacataactaagttaaaattgagtcaaaaagtgtgctaagattaggttttagatttttttttactttcagggaccaatgttgtgaacttcccatcacctatcttcatcttcatcccaaaatagcacaccctttcttggttattatgtacttcttttgtgttctgctaaactattatatactatacttatgctttcaaaataattcatttatatataattaagttttgtgtaaatatttaacatataaatatttagtagaatctctgaaaggagtgaaggcaaaaactttcctgacccataataattacatacctagagcatcacaaaatctattatcaatgaatggattctgaattctttgataacatgtctttaatttttaggatttaaagtacctcctttaaagcaccagaccagtagtcaattattatgatactcacctctgatattgtcttatccctgagtgtgtaataaacttctggtccctggaatttctcttccctcataaaactgtttctcaatgtatcattttgtgatgacttttttttctgagcttcctttacctacccaataggtacacattttttcccaagatgctacaacaataccagacaattccagatattcccgccttccacttgtgatctgtaaaatatatatactggttggttatgtgcaatgttttatgccctatgccctttcactggtgatgttttaaagcaagcattgtagatgaccatgaattatagcagacaggttcccagtcctatgctgtttcctaatgtacattttttctcttgtcacaactaggaaagtcacgtttcagtgttttggttttggtgaatgcccacaacaaggctagtgaaggaaggaggcatagtaggaagctgttggccagacgagcttttagaagacccttgctacatagagaggacgtagaaaatgtctttatcattaggtgagaaacatgaactgcattctttgttgcgtcatattaaaatgtaaatcacaagaataaattataaaaataaaacctaaccaaaacacaaacaggaggaggtaacagaggacagaacagagttcctagaaaattatattacaggacagacatacaagtacccaagagaaagcaaaattctaaaagtctcttagccaagtgtagagcacaaaagttctcctcagttcatgcactttcgaggcatgtcagttggaaaaagagcatgctataggagacagttttattgtgttttgtgcagtgaccttttaaaagggaaaggtcctttctgagatattttgagttcactcatgcatctgtcatagaatttgcttggaacgaagtgtgcctgtcaccccaacctttcttcagagcagagcctggcttcctcatgggaagaatgatgttttaagagtgtcattcagatggaacagaaagaggtcttctccaggtttgtcttgctactgaatcaataggatctcctggattttgaaaagtatattaaattttttttcagacgtcagagttggggggaactagttttgtttagctttatacaaatttctagcattacttgtacggatatgctggagattctgctgcctcttgcaatctgacagcctcatggagagttgaataaatggtcattgcctgggtaagtgagggctctttctaaagtgttcaagagtaggtcacatagagaggagtgccttcttcctgcattttttcaagtacctgttttcccctattttattcttttggaagggattgattttatggtagtccctttcttttctcacctcttgacagaatgtttttctaaatgattccttcagattattctttaggtcccattaaaagaaacatgctggttcttcattctcattctgtctttatgcttaatgcagatataattcatatttgttttatcaaagtcatttgataacctcttcaatgacaaatccctgattacagatgtattctcttttggtaacccacaggggttgaaattgctctaatttttggtactgtgtattaggttgagattaaaaaaaactttgaggacaatcttttccttatttaatatctggagaaaaaatactacatgtgagaaaggtggaaaaaggatgttgcactgtatgtaataaaagctatgaattttggcacttttgtaaactgtaaagatgtaaatgttccttaattattttcagtagtcagacttatgtttcttccagttgtatttccaggctgagacaatacaaaagatggacagctctaagttgattatcaagctttaaatatgtttcacttgattaagaacattgaaggtgagaatggaattatgtaggcttcactgagtatccgtaaagttgggaacaatgatatacaacacagaaaagaagctccataagaaaacagctgcaactaacccatctggaaagagacctcaatcaaaatgatacttagcgaaagaaaaatactttcagtgatcaaattatttgtctgaccaatgcttggtggaaagattccacattactagttatttgtaatgggtaattgcacaatatactgtattgttcaatctggtgtgaatgaaagtggggagatcttgacaattgtcttggaacaatagatgtaaaattgagactattctgggaaaaccaggatgtttgggccccctggtaatagtctaatcattatacatctgtgctataagcacacaaataacatctagtaatgaaagaaacattcagctaagaaaacttgcagtcaaaaacttttgataaagctgtgaagacttgttaggtcatgtattaatttaagatctttaagatggagagcatcccatcaatgattaggagaaacacaaacattttatattgtgtttaatacacttttttatgtttaataaaaaacatatcacctaccctacaactcataattaacttatataaagttttttttgtttaataaacatttcatattgtgtttaataaaacgcaaacattttattacttacaggtcctgggtgggggcagtacgtggcatgcctggagatgacacacaaggagatcaggaagtgtgggcagggagaatgtggacctgggtcacttgtatttattggagtccagggtgagaaacctaagtgtcatgggacgaggggagcaattgggcagtttaaaacaagcaggcacaaaatttcaaacaacccaacattaaaaaccctttctggcaaagaaatgttatctagaaatctagctgacccaaaggctgagtgtgtgggtttggggtaagagctatcttgcctcaccagagcaacaaaaaggagaagtcatcggctaagctagatagccaaacaaaatggatgctgaggcaacattaaattataagaattataaggtcaagatgggatggagattctggacctggtacaaggaagtgctgcaatgaatagcagggagttagggcagactacttccagtgtcctgagttttcaggtttcatttggctgtcaaaaccatttgttccctagactgtgatttgactggtgatgctggctggcagtgcccctactgatgacttagcagatgactctgagctgacaatttgccatccttcagctgtcttggtaggagggattcagttaccagcatgcacagcacagagcagaatccaacctcatagattttcaaaaacttatcgctaaagtctattattaacagcttggtaagaaaagtctttttcattgagaaatgtatagattattgtgaaggaaaagtatttgctaagaccagactggccgaagctaatccttttgggaatagccttaccaatttgggggaaatgactcatttacttataagctatacctgtcagcttccctttactacctttgacagctcttaaaccagcagtataagaactgctagtgaaaaaataaacattagtataaaactttatgtacctattacataacagtcatatattaggtgtccattttaagtacagatactgaaatagcaaaataatttattggagaaactcaaaatgctatagaaaaatttgacttggaaagcaccacaaatgtacatgatacaagtaaacttgaagaaaccaattacattgggggatagtcttgttttctgttattctgtggacttgctttattaatatatggaatttagagtttcttatatttaaaaaatatgaaaatgcacataatcattcccaggctgctcctgatcctttagtgatgattcctacagaaaaaaaaaaagtgcttgggatggggaagaactttgtggccatcgattttttctttctttctttattatttttatttttttattatactttaagttttagggtacatgtgcacaacgtgcaggtttgttacatatgtatacatgtgccatgttggtgtgctgcacccattaactcatcatttaacattaggtatatctcctaatgctatcccttccccctcccaccaccccacaacaggccccagtgtgtgatgttccgcttcccgtgtccatgtgttctcattgttcaattcccacctatgagtgagaacatgtggtgtttggttttttgtccttgtgatagtttgctgagaatgatggtttccagcttcatccatatccctacaaaggacatggctgcatagtattccatggtgtatatatgccacattttcttaatccagtctatcattgttggacatttggcttggttccaagtctttgctattgtgaatagtgccactataaacatacctgtgcatgggtctttatagcagcatgatttataatcctttgggtatatacccagtaatgggattgctgggtcaaatggtatttctagttctagatccctgaggaatcgccaccctgacttccacaatggttgaactagtttacagtcccaccaacagtgcaaaagtgttcctatttctccacatcctctctggcacctgttgtttactgactttttaatgatcaccattctaattggtgtgagacggtatctcattgtggttttgatttgcatttctctgatggccagtgatgatgagcattttttcatgtttcttttggccgcataaatgtcttcttttgagaagtgtctgttcctatcctttgcccactttttgatggggttgtttgtttttttcttgtaaatttgtttgagttcattgtagattctggatattatccctttgtcagatgaatagattgcaaaaattttctcccattctgtaggttgcctgttcattctgatggtagtttcttttgctgtgcagaagctctttagtttaattagatcccatttgtcaattttggcctttgttgccattgcttctggtgttttagacatgaagtccttgtccatgcctatgtcctgaatggtattgcctaggttttcttctagggttttaatggttttaggtctaacatttaagtctttaatccatgttgaattaatttttgtataagatgtaaggaagggatccagtttcagctttttacatatggctagccagttttcccagcaccatttattaaatagggaatcctttccccattttcttgtttttctcaggtttgtcaaagatcagatagttgtagatatgcagcattatttctgagggctctgttctgttccattggtctatatctctgttttggtaccagtaccatgctgttttggttactgtagccttgtagtatagtttgaagtcaggtagcatgatgcctccagctttgttcttctggcttagtgttgacttggcaatgaggactcttttttggttccataggaactttaaagtagttttttccaattctatgaagaaaggcattggtagcttgatggggatggcattgaatctgtaaattaccttgggcagtatggccattttcatgatattgattcttcctatccatgagcatggaatgttcttccatttgtttgtatcctcttttatttcgttgagcagtggtttgtagttctccttgaagaggtccttcacatcccttgtaagttggattcctaggtattttattctctttgaagcaattgtgaatgggagttcactcatgatttggctctctgtttgtctgttatgggtggataagaatgcttgtgatttttgctcatcgattttgtatcctgagactttgctgaagttgcctattagcttaaggagagtttgggctgagacgatggggttttctaaatatacaatcatatcatctccaaacagggacaatttgacttcctcttttcctaattgaataccctttatttccttctcctgtctgattgccctggccagaacttccaacactatgttgaataggagtggtgagagagggcatccctgtcttgtgccagttttcaaagggaatgcttccagtttttgcccattcagtatgatattggccgtggatttgtcatagacagcgcttattattttgaggtacgtcccatcaatacctaatttattgagagtttttagcatgaagcgttgttgaagtttgtcaaaggccttttctgcatctactgagataatcatgtggtttttgtctttggttctgtttatatgctggattacatttattgatttttgtatgttgaaccagccttgcatcccagggatgaagcccacttgatcacggtggataagctttttgatgtgctactggatttggtttgccagtattttatggccgtcaatttttgaccctgagagtgaacctcacctttggaagttactaccaagcatttgacttttggaagactctttacacagcaagagatctcctccacctttgaggtgaggacattaaacttggtttaaaaaattacttttccaagtacattaactatgtcttatatattatccatacacgattactaagaaaatataaacattttttcatatactggttaattggctttaaagaaaaaaatcccctttttaatcccatcaggatttagtttgacaaatttttcagaaacttataaagatgaaaacacctggatgtatttctctgtaaactttggctgttagcatcctttttcaatgcttgtgtagtttttcagaacagaacctaaccttcaagatgagtcatttgttcccaaacttgaattgtcatgaaacactccttgggtttccctcccgtgctgaatatgatttctaagaatgggatggcatggttactgtataaagatcatttgttctacaggtcagaaggcctgagttctcatcattaattaactttgtgatgtatgttgggtaaatcacttaacctctacagttttatcttctgtaaaatatgaaagaaagactttgagctaaagtttgtttctactgtaagaacatgagatattttatcttggtgacatcatggcttatgggcaggctgaggtgggattagtaattgcaaaagcagtggtcataaggtgaagaaacctggacatgacttcagacttaacctgggaaataaaatcagggaatgtggacaaagtcagacactactttagcacaggatgagatgccagaagatgatggatccaacaaagacatgcatgaaaggccacggggctgtttctgggcttaaacaagctagtcttaattaggagaaaaagcggagggactggaggagtggaggagaggaagtcaatagtgatgcagtacttccatcctagagggtttcttcgagagccaagagttccaatctgtgcatggcattaccccttctgaggtaaaagaaaaagtcctctacaaaaacctgacagtattctgccctcaagccccttgttaaccaggccaaggtgaggcatgggtttcatgccctactgatagcagtgcaagatgtcttgttatgagtattgatatcgaagtatgcttttaaatcatatttcactctgacaccgttagctacgtaactaagtcttagtgctattgccagtggtccaatctaaatgatgtagtagagaatctagttcattactctgagctgggactctgatgaagatgtagggtgacacactgtctttgtgaagaaggcatgtgtggaatacttggtgtctttggtgagatggcagaacttaaaccgtgaggaggatggcaatcatgaggaatggtatcaggaagtttttccagcttgatagatgggaaggaaagcagaatggcaggaagggggccaggtgctatctccttgaaggagggatgaaccgtcctcagggtctgtctgctcacaggcaggagacttataccagaactgtgtttactggaagtcttttagagttcaaagtgaacttatctgagtttgacaaataatcccctacagcaagacaaagagtagtagatgaattatacatttggatactgttggaaagggagaggtaaaatccaagttggaataaagcatatgttatgggagatcatcaatatcattgagcacgggctttgaggattagagttatgatgaagtataatagtacagaatcagcttgagacacagtcttatgtttgttttggtcatctgcctagaagtaaggtgcagaaaatgcttatactttgaaaagtcgtgaattaaatagaactttctagcaatggttgatgaactgggtgggtgtcaaaaatcaagacttcatgattgggaagctgtggggatggggaattttcttagaaaagagagagactctaaatggtgctagtggggtggcctaagccctgacagtggaatgggacctttttggaagactgcacctcggggtaaggatgcttgtgaccctgagactagcatcaacccatgatagaacccaagggtgcagaaacctatgatagaaagcaagggtaccaaaaccttgagggtgttggcagactgaggggcactcagttcacccagggacatccttcacctgagaatgacttttctagatctccctgcagtggttttgagaacctgagtcctagttgagccttctgtgatgccttccaagtcctagcagtgtggcgtgcccacacatctttctcaacaaaggatgcagaaataggaatgtaattagagcagttcatcctcggtagagagtcctttgtggttcccagctgggcagtagtttaaaggatagccctgtgaatctactcaaatagtatctttatttaagatgtcaataaaaggtagtaaacttgagaatctctgagaagcattgatccatagtggaaattacatgtatttaagtatgaaggtagtaaatatatattaacaacacattatatgccagatactgtcctgggtatgagctatagctggaagtcagagcggtacaaaatctaccatgggggagtttaagaccaagttttcaagccaaacggaactggattctactaatttccagactgatgccttggagaggttacttgaatttttctgaatgtccattttctcatatattaaatgaccattataaccttgctctgtaagactgcttgttagatgatataatatctttcaaatatctgttaaagtgcctaataatagcataatagctactcaataagtagccataattgttttaacaaatgaaatttagactcctaggaaaattagaaagtactgcactggctttcctgttttcctaatggccatgattatttatccagtgactcagtgcagattttgatttattttccttttcatagccaccttatcaaaaagtcctgctactgttatttctacttcaaaatgcatctcaaatctattcacctctctctgttcccatctgtatcaccctagtccaagctctcttactccctagagcaatagccggtaaccatgtgcttacaacacattctctgcaaaggcagcagagtgtattttttacagcatatatcagaccataagggcctcttgcttataaaggaccagtggatttttattgcatttactatccaaatctgaagttgccatcataaccagacttctctcattctcttccatgtcttctggtatcacattcctgcactaacctctacaccctgcgtcctcccacctcacctcagcttcaccgtgttctcagtttccagcacgcaccaagctctgtgccacttcgaggcctcacacctgccgatctctctgcctatgattctcttctctatgctctttgctgaaccacctccttcttatccttctgccctcagccttacctcaaccagcccatcattctctcagcctccaccgtagcacttctcatgactggtgcttgcttatttacatgttttctcttgcgcattggccaccacaaaggtaaattcttatctgttgtgtgttcaccttggaatttcccatccttaactcgataggaggctcttattaaatatctttgtaaataaatgatatttttatgatagataattgcagattacatgattgttcagttgttaactctgtgcagtcgtagagtattctggttttaaagattagcacttggtttatatgtgaatgaactttcaaaattagacacgatcttctcagttttcttgtcaaagactgtttctaaagatttgcatgagctagtctggtcctggctatcttcctatcagggatgcattcctgtattggtagattctgtagattaactttctaaatcattcatggcccttccttctgcgccgttaactaggaagtataaagtactttagaacatttcattattagtattcccaatatgaccgtggaaatgtgggcagtgggatgaggcaatcaaactgaggttttctttcatgataactatttttgaaaactacctgcagtgagaaagaattctcaagcaggtgcagtggtgtttgagagaagcataaatggagtggttgagcccagaccttggagtcaaataaacctaggtttgcatctcagctctgttgcttacaagctatgtatttaaactctctgatctccaaagtggttttggtgattcaattagatcattcatacaatgagagtcttaacaaatggtaagcatttttaacttttagaaaaacacaaggcagttagtagacgaagtgtatgaggacattgctagcttaatataaggttctttaagggtaaaataaagagaaagggaagaaaggcagagttctttcttttttaacttcttaaaccttttcttatgaaaagatatgccacataaccataattcatcctggcaattaggtaaacagtatacagaatatgactctcgccattaaataaacttaagcaaggtatctttatcctgaaggaattcttagagatttcatcatgagtaagcacttttcagtatagaattgccaaaatacaaaagaacaccagagaaccactctaacttctaaaaaaaawaagaaacccaaaaccttgtgattgaaaaaaaaaaaaaaagtaagaaaaagaggcccttagtcattctgttcccttttgggcctctatctttcatttcctctggggaaataaagttataaactgtgctggcagtaatctagggtgatgccaagtcagttacccacccccaactccatgtctccaaaagattctttaccaccctttgactctaattaaagaaaacaaatgtttccagttttctrtcatgtacctttccactctgaattatagaatagctttcttgaaattcttttaattgttttttacaaaggattagcattaaattcatagataaaaataaattagtaatagtgatcaaaatgacctaactccactttgtttttacttttcttctgggtaggagggcaaataacataactgcttatatggtgatttattttaaattgaatctgaatttctatttcttaaggcctcattggcttcatggcaaataagagagttttaaagaatttattgtgttaatttctgaraaaccaggagtttactgttgacaataatggcacaaattacaactcctacacagctctaccccctccacttttgagtttcaagacttttgccaaagttttctggtctttgttcacttctattattaacatctcttgtgtgaaggggaattttgaatgaatgggatgaaatcatctaaaccagcttcggtcctaaatatagtgtctggcatcaggtctgggaaaaaaaaaattggtcaaagagatagcctgaggttatttttaggaagttggatgtttagggaaattratactatgaaagttctggcctctatctctgaagatattccattgagagatacatgcatgcattcaacatctcgtttttttccattcctgcccttygggtgttccgcgtcattcactatcttgtcattacagcattaagcagaagcttgaggcagaagatagctaatgcaacgtttccatttggtcctgtaatttttctgcacagagctttataggatttcatttcgggttaataaggggaagttggaaccgaggagaaagcttatgctctgccaacatatactgaggattactaaacttggaggtagaaaatagaacacaggaataaaaatggaaaagtcctggcagatttctccgtagcagacttcatccttaaaaagcagaattccatccagctcttcttggtggcataattccttatcatggaattataagataaatgctctgtttttatgcgtctctcttttctaaagttgaattgagtgtctgaaagacagatgatgtgtctaataccaccgttgttttacagaagggaaatctaagaaaactatagctaccctcctgggaaaacatatctaggcatttgctaacagtcatttaggctgcatctatgcacttccacacagaaggataaatgtcacatgttcgttgaatgatccagatgtttcaaatatacagttgttttatatttggtaaacaatgcagttaggtcatgtaaattttaatttttcatttggagtttatccctatgcaggcaatcatagattagaaagttatttttttcatgtcctacctctttgaattgtcaggttcttttaaatgctgttatgyagcaataaataatattttatccataatcaaggtggatgacttactggatatcagatattattattaacaaaaagtttactacattgtacaartatcactagacaaagacaacctctagaaagttaattaaggtaactaaggttctcaactgcaaccacaaaactttcacagttaataataatttcacagttattaacataactttttsaagaggtactatactaaaccaaggatgctaaatataacttattaatttctgtgatggcttctggggatatcaatattggtatactttcctcactgcaatgaagacacttctgcatctacttttgagatttttttggtcatctttctagcagccagctgtcacctcttgctgctgtaacagttcctagtaatagttcccttattcttcaaacctgatgttagcagggaggtcagatactcaagcatgattagaattgtagaagcttgagcctcatatttaaatgtgtgtaaatatatgtttgaaaaagaattaatgagctcttaattgcagatcaaaggatatggtttgatagtgaagtggcccaatgaaagttgtttgaattttccttttgtctttctgtaaatggaactgtgttcttgaaagcctctacgtctttatcttgttcctcaagattcttagggcagtgcgtgtgggtcaggggtaggtrtgtctgggaattaagagtatctagttgatttagtagctatatttctcttctttagcctgtttattgggaaatgaaagacaatttaggctatttcattttcagtcagtgtctgttatgaattcattggaaayagcaatgtgaaaagaggaatgaatattgtagatttctttcattgtcatatttgtaaattactgggtgggatttataaacaaattattgactaattatgaacaaactgttgtttttttcttttcaatcaatatgaacaatcaagtgacctaacamatttaattttaaaaatagatttgaaaggtatatagtagttaaaacaaggccccttgattcagattgcctgagttcatatctcaaataggctacttttttgtggtgtgcctttaggcaggatgcctcagtttcctcatatgtaaaaaagaaatgttaatagcagcttaccttgtggggttgttgtgagtgggtcaaatgacctactatgtgtaacgcactagagcagtgcttggctggagtaagctccatgtaaatgttagtccttgaatgaaagtagagctctggtagagatattccataaagacaaccttaaacatttttgaaccttttatgcctccaaaatatacacttccaaactcttctatcactgaccatattacttataccctaacaaggaagttattaagaatcataccagagtacaggaataaatcatgccagtcaggaaaaggggtacattggttattctatttataacattacttgagtatttataacaacaagtaaacaaaacgttttttagaaaaagaagagattactgtgttgtacaaatattactagatgggtaatttctctcctttttttccaatgtattccagaacccccatggatatcaaaattaaatgctsaaatcccttacataaaatggcatagtatctgtatactttaagcagattacttataatacctaatataatgtgaatgctatgtaaatagttgccatactgcatttttaaaattaatattattttttaatattttaacctttttttttttttttttttttttttttttttttttttttgagasggagtctygctctgtcacccaggctggagtgcattggtgcaatctcagctcactgcaacctccacctcccaggttcaagcaattctacctgcctcagcccccaagtagctgggattgcaggcacaggccaccacacccacctaatttttgtgttcatagtagagacggggtttcgccgtcttggccaggctggtctcaaactcttgacctcaagtgatccgcccaccttggcctcccagagtgctgggattacaggcatgaaccaccgcgctcggccacatgtttttaacttttatttttccaatatttttgatctatgattggttgaatttgtggaagccaaacccacagacatggagagccagctgtgtattgttattgtcatgtcttttattctcccctgttcttttctgcctaaatgccttaggtacttctttacagagttagatagcatttaccattgataccacccagagtggtgtggtttgcttctyctgaccctttcatgagcaaagctggtttcaggggaaactcagggatctgaacwgttagtaacactgattagaaatgcagcagttttattcaggccttggttttattgaccatttttggttggctcttatctctgtgactgatcatgtatgcgtatttcaaatggataaataaactaaaaagtgtttaatactccaaaatgattagaagtgtattgttaaataccaaaaagaaaataattctggggtgtttcagcatgttattctgttarcrtagttcacgttgagtgtttgtattcatttgttgtttgtttgtttgtaagtaacaggttttgactaaaattccacggactgtggaacarcacacactggggtctatcggagggtggaaagtgggtggagggagtgggtcaggaaaaataactaatgtatactaggcttaatacctgggtgataagatagtctttacaacaaacccccatgacacaagtttacctatataacaaacctgccattgtacacctgaacttaagtaaaaaaaaaaaaaattaagtcatgtagatgcgtactttgaggtacaaccacgtgaatgattgtgccaaattattatgacagaaaagtctattgttgatttagaaaaagaattaacactgggcatcatttgaataatgggctttataaagaactgcacatattggttactggtagtaaaattcacagaatgttagatataaaaagtcctaaagggtacaaggaaaacttggtttgtcctaggtcaactagtaagattaatctacaacccaggcttctgactctatttcaacattcttctcataatgtcattgaggttacacttaataaacaacgttaaacactctctcttttaaaaaaaattgttggctatacatgttggctcacgcctgtaatcccagcactttgggaggctgaggcaggtggatcaccagagttcaggagttygagaccagcctggccaacatggtgaaaccccgtctctactaaaactacaaaaattagctgggcatggttgcaagtgcctataatcccagctacttgggatactgaggcaggagaatcgctggaacccgggaggcagaggttgcagtgagctgaaatcgcacattgcmctccagcctgggcgacaagagcaaaacttcatcccctcccccccaaaaaattgttaactactacaagcataaatatgaatatctacttacctgcatttctgaagctagaccataagtattaacagtgcttatatctacagtccctggcagatagtcggtgtaagaaatatagattaattgaatgaatcatatgatcatggttaagkttcttcttttgtgcgttttagcatttttaaatttttacattgatcatgtattgcttttgaaattttaaaaaacctggcaaaatrtaattacgatagaaactgacatcaaaaagctttgtagctgaaatagtgtaattttacactgagtttgaaacttctgatatcaggaactttgatgagcctaatacaggtgctatacgggatgaagtgaatatgcttagaatttttgatgaaaacaaatctgactaytcaggtttctctatgagaagggtaggcagtttgatttgtaattatgggaagctgaatgtgaggcttggatgaggctttgtcagtatcagaccagctccttcctattgggggctgaattcccttgggctctccatcagagagaccaacaggaagcaatcatgtagttcttccaacacactcagaagtcagtaggtccactccacaaataaattgtaattggccatatagtaaaatatttggtagtgttattcttgtccttttccatatgtacaagagagaaaaataaaacaacttcacatcctcctaagcaagtgatcgagtttagatatttgtcccctccaaatctcatgttgaaatgcgacctcctcatgttggaggtggggcctcactggaggtgattgggtcataggttccctcccagtggtaatgagtgagttcttactctgttagttcatgcaagaattgatggtttaaaagagtctggtgattctctcccctctctcctgcctgtgctctcaccatgtgacatgtctattcctccttcaccttccagcatgattgcaagcttcctgagttcctgaccagaagcagatgctggcaccacrctttgtgtatagcctttagaaccatgagccaaatcaaccacttttctttatgaattattcagtcccaggtattcctttatagcaacacaaaacaggcaaataccggagcaacagatcagaataaataacgctgagaggacctgacctgatttgctrtaggtattgttctagggtagcccctggtatccattgaagactctgaccgtgagctctgcctgcattaatataactggaccaaaggaaacagaactttagttttatgaatgggtgtctctccaaacaatttttcctggctgagctttgttcattaacatttttcaatttctaaagaacaaataatctccatttctctttttatgtccggcccactctcctgatagatataacctccctcctgtttagttccatgaattgtactccagctgcccaaacctgagaaaaggaattaatgactcattctctctgttgagtgagggcttattccagctggctcgcgctattctgtgtgtatggattctgtcagcagggttgaaataagatgttaactggcagttattcattaatttacagcaagaacaatgacttgactctatgtcaaccatttctgaaacattttgactaacatttttcctgttgcttagaackgaacttaaaagctgggacaggcatatggaaagaagcaaggatccccagttatgctgattggaactaggactaatggttttaacacagaatgtttatgcatgtagaatgaaatacacacacacacacacacacacacacacacacatacacgcacatacaaggggtcatactttatgtttgcattttcctctaaaagtatccctaagagtatttgtggttagtactacatttttttcatcatagtttgtttaaaagataaagcagatattataattattttctttacaggtgggaatgagttaaacaataattaactgaacaaaagcaatgtccaggtactgcaaaactttacataaattactcctattcattttcacagcaaccctctgaagtaaatggtattatcccaacttacagatgtggaaactartactaattaacttacctagaatcgaggtggcagagccaagacacgaattcaagtttctcttcctcaaatttaacattctttcttgtacaaatgtaaatgttctttaaaaatgaatacataatggcaggattcatatcaattttctgccagaattaccatgtttacctgaagtaaaatatgctcataaacaaagcagaaagtgcagctggtgcttacatctaggatgattaactggcatgtacagaatttttttttccttcaattgcaaagtgaatgcagtaaaattacagggcaatgggtttcttcccacacaagacaaggtgatctgaatgatatagaagagaaatgccacatgtggaaataatatatcaaggatttattaygtgtctgtggtcattcttaaggtcatttttgatgtctacacatttcagcatttgagaagttgtatattacatgcatacaaacccatattcaaatatacaattggctaaacaagtatttgttttaataaagtagtartaataaaatatttatagcaaaggrgacaagactcaggactgagaggaaaaactcaattaaaaaaaagacaacaatacttaaatctcttgatgcatctacttagcaatgtctacaatagcttttttaacactatcagaatatagagcataaattataatgtttatcctgcttttaaaggaaaatttttctcttatgcaatcatggtgggagaaaagaattcttaacgtgattatttgtctcatattttattttaggattctgttagtgtttttaggattctatcaatgcaaggtgtaagaacatgtcctggcagttgaaggaaagrctaaggaaaaagatgaaagagaagtgtcgcatcccttaccctccttttaaagaaatgctgaagttgctgagcagaargtgccacagtcatgtcccttaatttatccctcaaccttttccagaagtaaagtgactacacctaagctcagacagtgacagtcgtgggagaaaagctttatagraacagtgataggaataaaagtgtgtgcactgggatagatgtattttttaattacagaagtaactactaatctatataagagaggctccttccactctcagagcttccaacttaaccatctgtgaagagtaggtccttcaaaaccaactgtagcggcaaagttctgagrtgatatttccagactcagcagataggaacaggcatgctaggtgagatatggcagggaatattagtcagggttctccagagggacagaaccaatttgtgtgtgtgcgtgtgtgtgtgtgtgtgtgtgtgtgtgtgtgtgtgtgtgtgtgtgacagagacagacagaaagagagtgctttagtttaaggaattggctcacaattatggagactggcaaatctaaaatcttcaggctgggttggcagtctagagactcaggaaaagctgatgttgcagtttaagttcataagatttctgttgtcagaattctctcttgtttggggagaggtcagtcttttgttctattcagatcttcaaccgattgaatcagccccactcaccttatggaggacaatttgcttgactcgaagttcattgatttaaatgtaaatcttgtctgaaaacaccctcctagaaatattcagaataacgtttgacaaaatatccagggaccagggaccatggcccagccaagttgacacaytgaactgaccattacaagtctagttggcacccatatacatctccttaagccattcttaatctccaaatgtggtcacattctgaggaactggtggttasagcttcaacatatgcattttgaggagatacagtgtagtccacatcatggaggtagccctagaatttttttgtttccattcctattggcagagacaattgaggaaaagggaaagttccctttcatttattttactctcctgcacatctaatctttaaggagagaatagaatgagagttggggcacaaaacaaggattgaagggcagctgacttgagtccacgtagccccagaacaaagcaaaggracattagattagtggggtagtagagattaaagaagtaaacagaattgaaactggcagaagatagggtcattgtagagtggaaaaacatatctgaaacatggttgttaagtcataagctaatatttggaaagacagactccacttacttttttccaatagatatatatttactaaaatcttgggaaagctaagcttatgatcaggtgtaaccaggccatatcccttgggtcccaaagtcaataagcagggagagcttggtgtttaagtccttaggaatgggtcatgccactcagaaaagagaagagatgtttcgatctgtggattgttatcatctgcaacccaggaggctctttgattcttcatatcacgttatttttacctgaggattgtagataccctacagtcttaaagcctctggccaatctgccttggaaccacaggatacattaggcaaggtctggggctggctttgacaaaggacacagtattgctggcagaagaaatcactcttaaagggaatatagatgctactgtgagagactgatcaactaattaagatcttgttgaagattctcaaattgagtttgagcttgttgacaaaaaccaggcttaggcagagggatgatgatcctgagagcatcctatctccatcaataggagtatgttttcaacctagtggtttttttttttaatttttattttaggttccagggtacatatgcagatttgttatataggtaaactaatgtcataggggtttgtaatacaggttacttcatcacccagggattaagcctgttacccaataggtattttttctgatcctctccctcctcctaccctccaccctccaccctcaagtaggccccagtgtctctttttcacctctaygtgtccatgagttttcatcctttagctcccgcttattagtgagaacatgtagtatttggttttctgttcatgtgtcagtttgctaaggatgttggcctccattcttgccatgaaaaacaacaggaaaataaagcactacccttgagcatgcctctagaacttgaggttcaagaacaacagaagagtggcagaaaactatatcttaaatatattctttatcttttgtcagtcctcaatctggcaagaacattgctgctacctgacctcatagacatgcatttgaactcctacttttagtatctgctctaagatctgatttaagaacagatagtagaatagaataagcttggttctctaggtatcaattttcccaaatttcacagtagttctatgtacagtcacattgtatattataaaatatatgtttaactgtcacatgcaagtatatttcagtttttaaaagctcaaggtgcatgctgatagtcactataaataaataaatacatatgtcaacatctccctatccccaattcctccctcatcaaaaactaaataaagggcaaatgaataaataaataaaaatgtttaaactgctgaccttcctgtcaacaaaggtgatgtgagttacaagaatctgttttctagctggagatgtgggcgcagtcatgagtatgcctccaccattaacagcactaaacccaacgtactcacaaacaacagctgcatgaaaaggccaagcttagtatcatgtgtaatttatgagagcttgttaaaacacatacatgcacacaaagttgaatgaataataccaggtgatggttaggaaacagaaaattcctgaagcatctcttctttttaatgaagtatcaaaaatactgttttattaaaatcgggagaaaaaaggctttaggccaagtgtgttgggttggccttgcaactctacttcggttacaaatttaaaggccaaagagttagagattgtgtatatgggtatgtgtgttgcaggktggggtgtgggacatatcaatacaataggtaaaatgaatggtggattgtgtctgggataatgtggcatattttatctcaaatcccaaccttatctcccaataggagatttggatcatgagcaagatttggcttaggctagttttcaattcccaggattccagctccttcatagcaccacccttatgcttactaatcccttcatctttaagacacctggataatgagctatctgcatggttggaaatagtctgggtttgttctaaattttacattagataacaggtcagcaacaaaataatgggagggggaaattagaaaacattaagtcttatttcatgtcatgtgatacagtatatatgtattttttttaataaaagaaagtgacatatattgtagttcaattggatatttacatttcatgtagaccataatggtagcggtaattatagaaatcttagcaactttcaaaggaaatttttcccagcaagatgactgacaaaatttttgaaagtaatagagagaaactgaggcataaaatttacctgaaagcagtcctgtttaaattggacaaaataattaccttttcttacatccctcttttagagttttcctaatatcatttaatacatagatagtactagaaagaaaaagacattttaaattaagaccaatgtgaagcattataccmatttagtatcattttgcccattacccttatagaaactaaaaatagaatgagtgctcagagtttgtactgtaactgcctgccacttacatgggataactatttttagttccatcgtccttattaaaggctttcattatgagttcatttatggaaatgttatctcacagagttttttttggagacttttctgagatctcaaaatgaggtctcagaaacatgattagaacatagtcatttagtttcccagcaaatgctgatcctttccaggaaagttctataaataaggaaccaaagctggttgtcagtaatttgaagtagctgggttggaccgtgaatattaatatgtaaattatagcttgtgccatctatacacaaccaggattgtatgcatatcttcccatggtttattttmagtctgaatttgcatacaaacactggtctaattgagtttttaaaaaaaattcttaagagatgccatgtgttacttaaagatgttttgttttgaaactttgtgataggtaagatccactaatgtttgtaaaatttaccatttgtaggaaatattctattctcagtaattcctggtgaaagtggtaggtgggttagagatcataaaatccagtcttcacgggaccaagctggaacatggctgggtagctggtggggtagtgacagccctgcttcaaggagagatcagaaatgagggatgagactgagtgcaaagtcaaggtcaacacaggctaatcttggcttttggctacttttctgtaaagagtaatgtttctctatttgaaggagtgattttaattcagaagtatattggaaaagtgaaagaattcctagagaaaagttaatcccagacaagatagtgaatgacatatagtttattatccagtgacctttagcacaacaactacacatatgcgcaagcgtaactgctgggctgctctggagttcgccagaaaccccttgcccttagtttgaaggagggaaagaaatatctgtaattattgctctatatcctttgcttttgacataattgattctctggcatttaaaatttatatccactcgcccataggattcttttaactctttcattgtttatttccttgtataagaacaggtctgctagtcagagagaatgttgagtatctttcataatccttgtctttatgggaccaaacatttctgccttgtgctagaaagatttttcagcccagccccaggcaaccaccattcattctactctctgcttctatgagtttgactattttagttacctcacaaatgcttttgctgcatttgttttgtattttaattacaccgtttgatggcaatgctagaaatttaggagctacagctcctctctaacatgaatgctatcttgtcaatgccttcagaagaataaagatcataattctttcttttacattgtgatttctataagaatagtttcctatcttcctggatctagatggaagatattaactttcagactaactgttcactggacaatttttctttcattattcctaaggtctttattgtacatatgatggtgtctccaatagttaaatatgcctctaactacaacatataatttaaactcatacctcacctgggattatattgatgatttttggttcaactatttctcaaatttgagatgctattcagaatttaagtgaggtctaataccataggcagggattagaagtccaggccagaagtctgaagtcatcagcttgggttctgttgatgtgaagtgaattggatcacacagagatagacatggccacagtcaggtgtgatacttgatgtgcctatgctttgcctcttagccagttcttagtcattccatgcaccgtgctccttagtagaagagagaacccttcaggtagacttctgtgaaatcctcacaaggcacagaaatttaatggcatttctgagagtcacaagggttctgtgaagtagaaattatgctctcattacattagcttaatgctgagtatattgggactcttgtaaatggacattttgttcatggatattttgttttagcaatttaaagaatgttaactagcttaatattttagagtgaacattttaaagtgataaagaaaaataagaaactttcttatctcaattaaaaatatatatgtatttttggtccacacaaatcacatcacccaaataaktcagagcactttgctagaaaaggcaagacaaggtgtttctgagagtgtctccgcatttagatagactatttagttccatacttagagatcatccactagggtttctttgagcttggtgaagaatattcagcaacttgcctaagctctgggaatgtgagcatcagttatgaatataggtcatctcagtttgtgcacagcacaytttctgtcagtccaatataaacttgtatgagtagatctgtttattgtgataactacaacttatattaacttgttgacatgctttttctaacttattttcttgggtctgcatttttcaaagatcaaaatttctgcatcttcagcacaagtagattgaagaacacataatacggatagtgattaggaacattcaggcatggggaacgggtgacatattgtttactgtgtttaaaagatgtgttataaatttcacttagtcaaactaacttgatgaaatcaagatagcctatgaggaagaataagctctgcaacttacatttttatatgggaagaaataatgagtcagtcttcttgaagttttttacattattatagtaagaacatttaagatgagatatacccttttaacactttacattttaagtgttcaatatagcattgttaactctagataggacgtttcatagaagatcttagcatctgacgtaactgaaactrcatgcatcgaatagcatctccccatttctcccacttcccagccccaggcaaccaccattcattttactctctgcttctgtgagtttgactattttacatacctcattgataatggtttggatgtttgtcctctccaaatcgcatgtagaaacatgattcccattgttggagatggggtctaatgggaggagattggatcgtgggggcagatccctcatgaatggcttagtaccatctscttggtgataagtaagtttttgctctgagttcatgtgagatctggttgtttaaaagtgtgtagcacctccccaaccgatctcttccccttttgccttccaccatgattatgagcttcctgaggccctcactagaaatagatgctggagccgtggtggtacagcatgcaggactgtgaatcaattaaacctcttttatttcttaaattacccagcctcaggtatttcttttctttctttttttttttttttttgagatggactgtcactctgtcactcaggctggagtggagtggctcactgcaaccttcgcctcccgggttcaagcaattcttctgcctctgcctcctgagtagctgggactacaggtgcgtgtgcccacgcccagctaatttttgtatttttggtagagacagggtttcaccatattagccaggctgctcttgaacttctgaccttgtgatctgcccgcctcaggctcccaaagtgctgggattacaggcgtgaggcgctgcgcctaaccatatttctttatagtaatgcaaatggcctaacacacttatgtaagtgaaatcatgcagcatttgtcgttcttgactgggttatttcctttagtgtgatgtcttccaggcacatccacattgtcgcatataatgaagttttaataactgttctaagacttagctgaagtcaaatggaatgcttctggtacttccctcatagcttatctcctggccttgactatggccatttcctattcccaccctgctctccaaggtggtattctagccatccttcaaggtcctgtgcgaataccatctcctctaggaaggcttcctttggtttcaaggcagagttcaatcgtaccccatctgaaaaccaatgacactttggagtacctcatgatagcccttcacaaacccctttaatgtgactgtgtgtgtatcgtctctctacagtgagaataaaagctccaaagccaggaactatatcttcctcacttcctcattctccacgggaccttgcgtttaataatttaacgaaaattcaacaagtatctgttgatggataaataatcatggaaaataaattccagacgaggtcagataaagtggattatatgggtaaacattgtggaaagtaagcttttcgaaatattgtaactggtgaaaagttgtccatcatagttaatgggctacctgagcaaatacctttcctgagctttttcttgaattcatagaaacttgggtctgaaagaaaacttacaagtcatcactttttttttttttttgagacaaagtctcagtctgttgccaggctggagtgcagtggtgcgatctgggctcattgcaacctccgcctcctgggttcaagcgatttttctgcctcagccttctgagtacctgggactacaggtgcacgccaccatgcccagctaatttttttgtatttttagtagagatggggtttcaccacgttggccaggatggtctcaatctcttgacctcatgatcctcctgcctcggcgtccaaaagtgctgggattacaggcgtgagccactgcgcctggcccaggtcatcacgtttagcctctcagtcctctatgttagaaaacagtaatccaaaaaaaaatgatttctttaatgctagatagtggctgaagtaggactagaactcaagtattttaaagcctgcttcacatttcttgttactaagctgcactgcctcccacacatggcctattttggtctctaaactgtcatgaaaacagatgctaggtccctgtcaaaatgtttgtgtatttctgggtgtgaaaaggtatgtgtgtgtatgtgtgtgtttgtgtctgtgctcatgtgcatggatccctggtggaggggagagaaaggcaatttgtagctgcagacttctgtcattgcacgcagcgcactctgccatggtgagttcatactccacagcaacagaacagctgctgcaaagggttggtgtgctattttcatcttgggtgtgtgttttgcatcaggctcttggcaatggcaagagtaaacctctgtaaagaacaccttcttaaccttttactgttacccacacttagtcaacagaaacaatatgtttaacaggagtttttcctgctggacagttaaatatgcagttcttgcatatgaaacatgaatattttgttcccttctgtggaatagcaataataataacactactagtaataccagctaaaatattttaagtgcttatttcaaacggaaaattttttttttaaatgccagattttttctctctagggcaacagtcatcttgtataactttgaattcacactaaaatcctctgtagcaacataaagatagaaaaatcctcctttcagcaatatggcactgtgtgcaatgagcaaatgcaatgatatagaaggaagattgagtttaagagtatcagcagcaaagtgacagaaacgctcatacattaaaaactaaaaattagacttaattggttataggtgggaggagcctattacttttggtgaggacacatataggtgggaaaaagagaaagaaaaaaagaacatatctatgacaggaagcttcacagatttcattttcataatactttttgagactaaaggaaatagaacattttctgtcatatgtgttccaagtaatgtcattctgtttctcatttgtcttttgacctggctgtataatgtatgtggtgaaacagaactcctttattattaattttttagtggctacattagtaactcttttcctgacaattatgaggaagctcttgtatattgacaagagcataaatctatcaacagccaggttcatacatagagtccacctcttaaaggttataagatactgggcaagtcatttcatttctttaaacctgtttcctcatctgtgaaatgctgatagaatcataccttacatagatcagatgtaaataaaatagtcgtaagttagcgctcaggaaattayagtattctgtgcaaatcttattaactttgattttgtttcatatattgataaatttacatctagctgaaaatacattgaatcattgtcatggactaaattttaatatgtcttaggaaaagagtccgggttgaagtgcagtggtgcgaygttggccccctgcagcctccgcctcacaggttcaagtgattctcctgcctcagcctcccgagaagctgggattataggtgcatgccatcagacccagctaatttttgtatttttagtagagatggggttttatcatgttgaccaggttgttctcgaactcttgacctcaggtgttctgccggcctcagcctcccaaagtgctgagattacaggcgtgagccactgcaccggtccaggacaagaatatttttgaaactatgagctttatcatcagagacattaaaacttcagaaggaaagagacctttgagttcttctgagccaactccttccttttatcactaccaacaacatgaagtcagagggaaatgacttgcmtacagtaagatgagcaggaagaagtgaaagcagattaggggctgaggtcttcttagtttatgtccagagatctttccacttcacccaccatactctacattagtcactaccacgaccatcatcatcattatgaccaaaattaaatctaaacaacttttcaccaagtaattccattttcatgctaaagatcaggcagttcacttccatttcctcttttgtcagatgaaggaattgggccgggcgcggtggctcacacctgtaatcccagaactctgggaggccgaggtgggcggatcacgaggtcaggagatcgagaccatcctggctaacacggtgaaacctgtctctactaaaaatacaaaaaattagccaggcatagtggcgggtgcctgtagtcccagctactcaggtggctgaggcaggagaatggcgtgaacccgggaggcagagcttgcagtgagctgagatcacgccactgcactccagcctaggcgacagagcgagacttggtctcaaaaaaaaaaaaaaagaagtaattggatgaggtgatttatgtaattcctacaacctctcagtgctaacaaagcaacattcaatgacatttacaatgatcatggtggcaagttgggagagagaaagggcatttctgaagtaataataaaatgagtaaaataagatggtagtgccgtgtgttgatattgtgaactttacatttttactttctctcatccaaatcacagtaaaggagctgaaataagattttagttaattggtagccacacatgcccacaggctggtatgccaggctttgtttttctcacactgctgtaccatatccaaggccagagtgaatttcaggtgtcatgggctctacaagggcaagactggagtaggagctaaagtcaagttcccattggagaggattgaccaactgatagaggatggaaacgaagagccaaaggggagaagggacaggaagtactgagatctgaaagcaaattgcctaacatttagaggtgagaatgtgaaatgaggccaaccagggctggtgcagagccagaacaagggaggtcagaaagctaaggtgaaattctggaaataaatatgatgagagcttattgtaggggagacttttgggggactatggcctcgatctgatgkgtctgcttgtccccagtgctccttcaaacatgctccttgaagcttcatgcctgccttagacagccagagattgaaaatgaacatatattttgaaaacaaagacactaagaccattcacaaaaattcaagaagtaattttttaaaaaaaatacagtaacatttaaaaaatatatgttatttcacaacatatgtaaaaccattaaaatacattgacatcccaacacatattttggggtgtcaaaaaagaaatatggcagggtgcagtggctcgtggctgtaatcccagcactctgggaagctgaagcaagaggatcgcttgagcccagttctagactaacctgggcaacatggcaaaaccttgtctctacaaaaaatagaaaaacttagctgggcctggtggtgtgtgcttgtagtaacagctgctcaagaggctgaggcaagaggattgcttgagcccaagagtttaaggctgcagtaaactaagctatgatcatgacactgcattccagcctgggtgacagagcaagaccctgtctcaaaaaaaaaaaaaaaaaagaaaaagaaaaaaaatagaaatagtatatgttgataggaagcttagtgaagaacattaaaaagatttgcttgagctcttggttgccatggcagagctgcgggagctccgggctcagaagatggtggactctataaagaagcctcttgagggagttacatctgggagttgtaatttttcatgttcagcaccagatgttttgaggacaggcaggtgtttatgcagcaggtgtggcagtgcacagaggactgccacatgcctctggctcaagaccaagccttgaggaccacggagataaagaagttccaatgccacctgtcccagtgcaccatgcattgcaacgacaaagccagagattcactagatgcagggagtgaggatctttaggcgaagtgacagctggacagttgtgtgaccaagtgttgatcacatgcatgtcaccctgacaatgaccaaggagatgaaggagatgttctcatccactgggatacgtatcttggccagtaaccatcagggctgaggacaggaatctgtttaacaaaaggaaggagaattttagtctttaaggatgtggggaaaagaaagagagatcagactgttattgtgtctatgtagaaagaagtagacgtgagagactccattttgttttgtactaagaaaaattcttctgccttgagatgctgttaatctgtaaccctagccccaaccgtgtgctcgcagagacatgtgctgtgttgactcaaagtttaatggatttagggctatgcaggatgtgcatagcccgaraaacacccacaggtgtggaggggcaggccaccccttcaaaggcaagtgtcatgaatgaagaaattaaggatagcaacaagtataaggcctatgtcacttgcctttggacaaaggtccctttatatttcaatcctggaaagtgaaatgaaaaaactagtgctaaaattaggatcaaagatagtacaggaaagtgtatttaagtcaaaatttcatgtggcaagtgcttctcctggcagcaggaatatccttgtaccaagccagagccttccaaggtacaagttctttttcactatataggaaccgacagactggcagggtcctctaatctggctgtgatctggtggagtttgaggagaggtgtttctgtttggtgtgaggctcctgtttaccagaagtgttgctgcaccattttccataaacaataaaacaaaatccatgagataattcatttagtggggcaaaaaacgtttgttggtctttgttttgcttggttttgttttatatgtacaagggcataaagttgacttaggatgtggagttgggaaggagagtagtttggataagatctttgaaaggttgcttatgggtatcctttcctggtcatcaagatgtggatgtrcctctcttgaaattcttactcactgcatctttcagcctggatatgatgcaaaaacatgagcggtgacttcacatttaggtttgaaagcagagcttccctcttattggctgatggttcctgaggatgtctgcagcagagtggcaggacaatctagcagaaatattttccacttaaagagatagggggtttgtgtttggatttggttctgatatatacctgtatccaggaataaacagtgaaagaggaaccgttggctacataattatgagagttgtgaagtgctgaatttggaaaaacccggctttcatagaacagaatggaatgaaagcccaaacccagcattgcttacgtagcccctgaattaacagaaccctattgagataataccctgccaacagcaaggtcaaagaagaagaagtaagcgacttggctaggatgagctgtgacttccttagagcaaaggaggggcagccccattaccaaataccacttttgcccaggcttttgtgacatgcagtgctcctgcccagcatggcaccttattttgacaaggaccttgttatctttccaccaagttatcacttgaaatgataatatagcttgtatgttgttcccaagctgtcgtatattttcctggttgtttgawtttaacaatgagaataataaggtttaatactcctccctaagaaaagatttgcttatttcccaatttgaaattactttgctaagagggatataatgagttctatagtgaaacaagtatgtgttttatcctaatttctgaaattattcctgaaaattcaagtccattgtttgtctcccaccctatcctttggttctgtcacctcagaactaacaccttgacaaagtgtttcttttttgtccttctaccctccccgcaaaagtttattttttaataaatcgtttctggcaccaacccaaaccacaattacttaaaaagaaaaaaaaaatagcccaggattccatttacttataaacttgctttctgaactttatttttaatttcagcatttttttttttttttttgagatggggtctcgctctgtcgccaggctggagtgcactggcgtgatctcggctcactgcaacctctgtctccctggttcaagcgattctcctgccttagcctcccaagtagctgggattacaggcacacgccatcatgcccagctaatttttgtatttttagtagagacagggtttcaccatgttggccaggatggtcttaatctcctgacctcgtgatccacctgcctccgcctcccaaagtgctgggattacaggcgtgagcctctgcgccgtgccattttcagcattttttgatrtcagttatgggttcattgttttcaatataagataacatgagcagagactgtgtaggtgggattgagagtgaagactgggctcattgacaacctctcatcatctcgtcaagcagagtttcccatatcctctgaatctatgcctgtgtaactccaaatattagcataaatataaaaaattcatccatttggatattttatctacatgatattaattattgaaatgaatctaaattcttttcacaatgattttggcaagaagcactggcttggagtaaagtcagaaaacatgacacatagcaaacatttatagaccatctttttaattgtccatatgaaaagaataacatctagctgattagatgtattttaggggaatttgggaaagaataaataactctatgccttatgactgtcctgatatctgctatttatatctctgttctgggcaaagaacaccaaaaccgaatgaattaattgttgtgcatgctattatgtcttggatatagtaatatcaacatttatacaaatatcgactcagtacagataaaaaatagaaagtaattttcatcttttgtttttaaagaaggaaaaatattattatagaccctgaaccttcttcttcactgaatgggaggaaataaaagatatagaagcctgaggaatataaaataataagaaggtaatgtgatagaaagtggctgaggctatgtagtttgaatctccagaaaaggcctctctgagaaggagactttgagcttggagatctgagtaacaagaagaagccaaccatgcagggaacagtatttcaggcagagggaatagcaagcacaaatgctcaggtgtgaatgattccagctgtggtagccagagtctatgatgcaagggctaggaggggtggtagtgaaaggagtttgcattgtatttgaacaccaggaggaaaccaacacgtagcattaagcaaaaagtggtatgatatgatttatagtttcaaaagattacaatggttgttctgtaagaagataccagaagaagcaaggagaccagatgtggctattttaaaaatttttcgttgatacataataactatacatatttatgggatacatgtgatattttgatatacacatacaatgtgtaatgatcaaatcacacacttaacatatctgtcacctcaaacattatcatttctttgtgttgggaacatttcagatctgttcttctagctatctggaaatataaaatatattattgttaattatatgtcttaggctgtttgtgttgttataaaattaatttataaagaaaaatatttatttggttcacgtttgtgatgtctggaaaaattcaaaattgggcatctgtatttggtgaaggccacaggccacttcccctcatggaggaaggtatagagagcccgtatgtgcagagattacatggtgagagaggaaacaagaagggaacaggaggaaactagcagaggaagaactcactcttagtttctgcaagaggaattaactcactcccgatctccccactccctgggtaaggcattaatctatttatgaaggtttcacatctatgacccaaacaccttccattaagccccaccttcaacactgggaatcaaatttcaacatgaggtgtatagaggcaaacatccaaactgtagcactatagtcactcgaatgtgctgttgcacactaggacttatttattccttctatctaactgtatgtttttgcacattaaccaaactgtcttcattcctcactccctcatccttccctgccttcagtactatatttctactctttatcttcataagattcacttttcagcttccacatatgaatgagaacatgcaatatttgtgcttttgtgtcaggcttatttcatgtaacataatgacctccaattccatctatgttgctgcaaatgacaggatttcattctttcttgtggctaaataatattctgttgtacacatttaccacattttctttatccatttactcattgatggatatttaggttactttcatatactgttattgtgattagtgcaacaataaacataggtgtgaagttatccctttgatgtgcttttttccttttctttggatcagtccccaaattgagattgctggatcatatggtagttctatttttagttctttgaggagtctccagactgttttccttaatggctatgcaaatttccattcaacagcgtataaaagttccattttctcggcatctttgtcagcatttgtaaaattttttttgtctttttgataataaccatactaactagggtaagataatacctcattgtggttttgatttgcatttcccaaataattccaggaaagagatgacattgggttagattagaggggaaccrggggatgagtacaaaagatgaggagaagttagaatctattttagaaacagagtcaacagaactcaccaaatagatgcagttaaggaagcaaggaaagtaactaagggtaacacctgtttgtggcttaagtaactgaataaatgggggtaagacaatatgagacagcaaatatttggggaatattttatgtggtatttttggaaaaaggtgaaaatgttattaatttaaaatctattatgcttccaattgaagatgaaaagaattgcctagaaaagtctggaactcaaggaagaggtcagggctggagatataaatttagaagacattggaatataggtttaattaaagccagttggccagatgagatcctccatgtaaagattatagatagagaagataagagggatcaaaaccaagccttggggaattccagtattaagagttgccagagaaagaaaccaacaaagacagaaaaagcaatcagtacggtgggaagaaaccaagagggcctgatgtcataaaggcatttcaggctagagaaagtgtttaattaaagagaagaaagaagaacttccattgcatttggcaatggaggtcacatttgtgatctggacaggatagttgcagagagtaatgagtttaagttgtacatcaaagtaaaagacacacactctggccaaaggaacagccacagaaggctggcatatgatgtgcctggcacgcaagttttggttttgtcctttggattctcctgttagatatatgtggctgttaaacaaggtctcagaaataacggcttggtaatggatgattctgacaggatacaagaaatcccagagtgttaagctcatcaggtttattgttagttcttgtttcctggaagtgtttgaagccttgactctattaggtgaaatatgactccattaaattgtctgacattttaatactttaatttagtgccagggaccacttttagtgtaaaatgtttcacagagggttctattttaaactgcctggcttttgtaactctcagttttttcttccaagcctttcaccagtgtaaccatcccaaatttgcatcttgtctgatgctaactgaggaagaagggcacctggagtttgaccagcaggaacaaaacatgttaaaattgttgcagaagatgatgaggtaaaaacacatagcactggggcacaaaaccctggagcctggagcctgttgcaggtgtttagcactgaccttccacataaccatgggtagccataggacctctttaaccctcagttttcacatttgtaaaggcagtgagcaggaattgcattttaaatatacaattgttgtcactggtagcatctatctggggccagtggcacaggagtaaagagaatttacccagacagttgtgaggaaagaaagccatattgattagagaaagcatgaaaatacgttgcaagggtgcaatgggcaaatcagcaagataggagctgactgcaaggagacaaaggcttgctggggattttatgggatggcgcttgtgctggggagggctatgtgctttactgataatgccaaagttgtagtaagctaacttgcagttttctattgtctgagggtctgatagtaagttgggcatgagaagattgttagtaatttgcacagaagggctatgtgtcctggaccatgaagaaaggcagacttgtagcttatctgctttttctttttggtttctcctgctcccaacaacctgactccttttctctaattaggacttcacaagtgtggcatctcatgtattctaaagtatatggtgaccatctaaggaagttggtttgaatgtgcaggtctagcaaagaacatgccctggatataaaacctaggaatcaccatctgatcgaagatggagatgaatgacttcaccctagggcaagaaggacttaagaagaataggaaggatggcaggaatggaggaaaacatkktggatggaaagatgagacactgaaacaatttgaagattggaaggtgagagtctgaggtccaaagctttacaccagttgttgaagaaccttgatcacaggccagccaggacctcaaaggctcaagagaaatgatgacaaggtttgcttggcttatttagagctgggctatagagcgggaagattgtggttaaatcttagcagaactgataaaaagcatgaagttgtactgagagatttttcaactgtacatagttgcagaaagaaacaacctgctaccatagtaaatatttgtgttagaactcagtggatgaaggtggaggggggaacatggactggaggggctaacagagtatatgtagtaggcaagtgggattggagtacaagggaaggatagctgggggtgacgaggttgagtctgtgaatgagaagggcttaggtcaatttctctttctacccttcttccagctcttctcctccctctttattcctcccctcttccccttccccctcttttcctccttccctctgcctcctctcttcttcctcctttctgcctttactttatcctttaaagtcttaaaaaacaaaacaaaacaaaacaaaacaaaaactgtgatgatagaacccaaagtgtactgagagatttcttaactgtgggcaggattgttaagtggtagtaaactcaagacaacatttatattgcactttacaatacataaagcactttcacgtaattaactcctttgatttgatcatcacaacaatgcctgaggctaatagttataaaccttgttactgatgaagaagctgaaattcttatcagttaaatgtgttgctttgggcttagtaattggcagagcaagccaagtctgtctccagaccccgtggtcttctggttccaaattccatgctcttctcattatacagcacaatactttttttttttataaaatgggaaagtctttttttttaatgtatttacagacagttcatggctttagacacacacacaataaagccatttttattaaatataagaaagtggagcaaatttgcgtccttttttattttctaatgacaatgctaaaagctaaaaggcaattggccattgacgggagaacaaaggaacctgaataattgataaaatgtattctaaatccagaaactgtcaaagtaggcgatgtcagagatgctgcagttgcttggttgttcgtgatatctgatgacgctgcatctcagtcataaaaacttcagggaatctgaaagaaataataatgcgccatggtattttgagcttatcaccacaagaaatactctgtaattgcatcaaatgattataaatggcatattttagggacataataagcaatgcaaaggacaggtctgcttattagtgccaaaatttgtatttattcccatrttgctttttttttcctaggcattttccggcatctcatttctgactattaaattataccccaaatagaatatgtaactacatgtaaccaacctattttggtctacattaagtgcagcagcataaatagaaactgaaaataatcagaagcatttagaatttcgtttttattcatctgatttacttggccttttgtctgggatgtaagtgattctgagcccctctccagactcacactttccccaggtttcagtacctggggctcacaatctcagtggaagagtttcaaggcaatcttccactcaggactccttatgccttgcatgcacacaaagcagcgttgctcaaaacataggaaacaactatgaggaataaaaaggaaaagcttgttccttaaagaacgagaaggaggccagcagtctttttcataccttcttgtttatagaaagcagatttttttttttttttttttttagtaaaagcatatttggagcaggaaagaaatatgacctagactgtgttgttttcttttattgtatctacaaatagtttagctgaagtgagcttttcagttattgattttaaatcataagtttaattcgtcatcaaggcaacaacaaatgtgatgtttggggcagatgcaaagttgaagtatgtctaaagaaatagcacgctagttgcgtttaatgtggaaggtaaattataacaaaacaaactaaaaccccacaaactstaaagattttcccttatagttatagaaattaggaaatgccctawtgtgcatctttccttcccaactgtacygagattttgaattttttataatttgtactaatatgtaactagaccagatataatctgttgaggctttcttgtgatggaaagcaggtgaaatcaattttcagttgaaatatgcttttcagttcactatatgatgtttgtagggcttttttagagaagggctttgcatttagacttgagcagtttagcaggcttcgtcggagggtaaatctggctgctggatctagttggaatgttttcytttcataagaagagttggagataaagtgattcttgctttcaaatacacttttaacaatacaaaagaataattgaagactttttcttttgagacagagtctcactctgttgcccaggatggaatgcagcggaacaatttcgactcattgtagcctcracctctcaggctcaggtgatcctcctacctcagcctcccaagtagctgggactacaggcgtgtgccaccacatctggctaatttttgtatgttttgtagagttggggttttgctatgttgcccaggctggtcttgaactcctgggctcaagctttcctccctccttggcatcccagagtgctgggattacaggtgtaagccacygatcccagcctaattgaagacttttgtatgttaggtgctaagtaatacaaaagtaaaagtgccactgtttctgtcctcaaggaatttacagtctggagaaggagacaaaatataaacaaacacactgataagtaaatgattacaaattgtgccaagtgccatgatagaaaagaattgatgtgcattatctctgtgctccctgttaggggcacctgacccatcaggaaggccattgatcatacccatcagtcttccaggtataccaaggacattggattgaatgtcacaggacctggattcaagccctgccatcgaatccagctgggtgtttctgggcttcagtttctgtatattcagtaatagtatcgaatattagtgggagtaatagcattgaatgccctccatgctcactggaacttcatccacaattacmatgtcttggtggctttctaagtttttttttaatttttaatttctaatttttgtaggtacacagtaggtgtctatatttatggggtatgtgagatattttgataaaggcatgcaatgcataataatcacatcatggaaaatggggtatccatctcctcaagcatttatcctttgtgttacaaacaattcaattatgttttttaagttattttaaaatgtacaaatacattattttggctatagtcacactgtcatgctattaaatgctaggtcttctaattattttttgtaccctttaaccatctctacctctccctgatcccccagtacccttcctatcctctggtaaccatccttccattctctatctccatgggtycagttgttttgatttttacattcagtaaatgagtaagaatacacaatgtttgtctttctgttcctggcttatttcacttaacatgatgaccacagttccatccatattgttgcaaataacaggatctcattgttttcatgaataaatagtactccattgtttatatgtaccacaatttctttgtccattcatgtgttgatggatacttaggttgcttccaaatattggctattgtgaacagtgctgcaacaaacatggatgtgcaggtatctctttgacatgctgatttcctttcttttgggaatatacccagcagtgggattgctggatcatatggtagctctgtatttagttttttggggaaatcccaaactgctcttcattgtggttgtactcatttacattcctagtggctttctagaacctcctcttggggagccatatggaaattttgctgaaggtgagaatatggcagcttgatgcaatgcagtgttttttcaagcttcttaatttgttgttgttttgagacctaagtctcaggagagatgcaccgaggctgctgcagagctgtagagaggagatgaggagcgagcaaaggaggtagggttggaggcgcagggcatctcccaccctgacttgtctcagacatgcccctcctttatctgttgattataccaggcttacagggaggattttatccaaagaattcacctgctaaaagaggaaaacattttaaaattactgttgtagtccaaatagtctctggaactagacgattctggattccaaatatagacatgtggtgcttaacgacagggatactttgataaatgcattattagactattttgtacttgtgtgaacatcacagagtgcacttacatgaaccctgatggcaaaacatactacagacatactacatactaggcttatgtggtctagcctcttactcctaggctacaaatctgtacggcatgttactgtacttaatactgtaggcaattgttaatacagtggtatttgtttatctaaactatcaaaacctagaaaaggcacagtaaaatatggtataaaagattttatttaaagtacacctatataaggcacttcccatgaatggagcttgcaggactgcgtgttgctctgggtgggtcagtgagtgagtggtgagagagtgtgaaggcctaagacattactgtacactactgtagactttataaacactatatttaggctacctatatttatagaaaaatcttctttcttcaataataaattaatgttagcttactgtaactttctgacttaataaatgttttaatttttcaaaactttttgactctttttcaataatagcttgaaatacaaacacattgtacagctgtataaaaataatttctttttatcctcattctayaaacttttttgaatttttaaattttttaatataatttttaaaattttgttaaaaacaaagacacaaacacacacattagcctaggcccacacagggtcaggattgtcagtatcactgtcttccacctccacatcttgtcctactggaaggtcttcagggtaaataacaagcacgaagctgtcatctcctataacaatgccttcttctggaattcctcctgaaggacctgcctgaggctgtttcacagttaactttttttttttttaataaaaaatacatgtagaagcagtacactctaaaataacaataaaagtgcagtatagtaaatacataagcgaataacagtttttctaatcattatcaggtaatatgtactccatataattgcatgtgctagactcatacaagtggtagtgcagtaggtatgtttacgctagcatcaccgcagacacatgagtaatactgtgacattatgagggctatgatgtcactaagtgatagaaattttttagctctgttataaccttataggtccacatcatataggcaatccatcagtgaccaaaatgtcattatgtagagcatgactgtattagttcgttttcacgctgctgataaagatatacctgacactgggcaatttacaaaagaaagaggcttaatggactcacagttccgcatggctagagaggcctcacaatcatggcagaaggtggaaggcacctctcacatggcagcagacaagagaagagaacttgtgcagggaaactcccctttatgaaaccatcagatctcgtgagacttactcactatcacaagaatagcatggcaaagacccgccaccatgattcaattacctcccaccaggtgtctcccacaacacatgggaattgtgggagctacaattcaagatgagatttgggtggggacacagctaaaccatatcagtgactacagtactatagcagttgaatagttttttttaaatcccttgagtatcttatgatctataaaatggcagtcaagcctatcctgtggatatttgcaaggcttataaatattgtctggaagagaaagatgacttaggagtatattataactcttgatgtttttattatatttgtcattaatgtgcacaaattataaatgtattatcattaataataatttatttaaaaaagtgatgggatatcataaaacccttgggtgaattcaaacatggccactttgtatgacaaattacatgcttctatttctgttccacccagggtttcttttgagcagtggaaattcatctggaaacttaatgttatcccactatagagagccattcttgatgtgccactaattctgccaaataggctgacttgactactctcttaggatacagaattatatgaagmaaaatagagttgagaaggaaaaagtacaaacgttgtgtgtgcatataacaaacagatgactgctttagacatatttggtctgtaaacacctgtggaatcttgcctgtgtctctaatttttccagattttgctcatgggagagacacaatttgttctttgaatgtagccattatattttaacatacatgctgatttaatcatgctggtcaaaattttctttttatagcatccagacagcttgtgcatataactacatgcagttttattttgtggccaactggcaaccatatggaagtcagttaaaatgtattttgattatatgactctgtgcacataggcacatcatctcaggaaggctcaggtagcatagaggcaagtgaattcagcctgagattacagtaaagacatgaatctgatagtctggcatttctggactcacactgatttcttgaagaaaagcccatacagttggaatcagtgccttaaattaggtttcttaatatgatgagctcataaaatatgtgttgtccygccttcttcagatgtgagagttgatgttacagagatctctttggtaatatgactattttaataaaatattcacaattaaaaatrtatagaagaaagcagcaaggaaagactagaactaatgattagagttgttgaaaatgcatacataatttactccctttttaaaaaaaatggaactgggctattctgttgtacatagacttttgtcaaaatcaaattaagaatactttactcagttttctttttcttcctttattcatctctgtaaatatgattttaaaggcccttgaaaacaaaataattatcttattaaaatttagttacatgttgtgtttaaaatgctaaagttttggccagcygcagtggctcacgcctgtaatcccagtactttgcccgagatgggcagatcatgaggtcaggagttcaagaccagcctgaccaacatggtgaaaccctgtytytactaaaaatmcmacaacaacaacaacaacaacaacaaattagccaggagtggtggtgcgtgcctgtaatcccagctactcaggaggctgaggcaggagtatcgcttgaacccaggaggcggaggtcgcagtgagccgagattgcgcaacagagtgtgactcagtcttaaaagaaaaaaaaaaattctraaatttatcggagaaaacaattgggatctatttttagtctcaaatgtaggcatatacaaaaataatacatagtagttttctaagtactattagacatttgtttcccattttgccatttgctttcagtttacctgacatgaagataaaaatgatagctatttctcacttggcatttgaaagacaagagcaataagaaacccagcaaaactcctagagaattttcatggggaaaataagcatattgacattctttgacttttgtaaattgattttttggctccagctgctctaaagccattaagagttagagttaatcattcttgatttttttattgttagtcagttcccttattcataacactgaataatagcaatactactgagttttatttgtgttcacatttagtgctatgttaaaaaattcacaaagtaacatactgaaattcttgcaggtaactggtaaaatatgtagtctttagtagactgttgattgatattctagtaaaagagtaaatcttgtgaatttcagaggtggtcccaagatggtcttaaccctactgtgttaaaaaatatcagcatctttttcctataaagacaacctgaaggctcttttgaaatatgtataagtgcttctttttaaaaaacttattgatcaaatcagcttaattagctatgaaaggaatgatccttcacccctatgttaatgtctgtttacactgtgagtttgtaaaagcttctgatagagattgatgccatatctaataaattatcccactatatattcataaagtactatgattatatctatatgaatatatatataggtgaatgtagattcatatcaaaaattgaaacccagagaaaaaacttggaatttggtaggcagaaccatgaccctcctcaaagaagtcctcaccctcatccccgaaacctgtcagtatgctctgtaacatgattaagggcaattaacattgcaggtagaattaaagttactattttagtccatttgtgctgctataacaaaatgcctgagactgggtatgtataaagaacagaaatttgttttctgttctggagcctaggaagtccaagatcaaagtgccagcaggttccatcatctggtgagtactgcatcttcagrggggaggggaaaggaacagtatgttctcacctggcagaagaacaaaagagcaagctaccaaacactgccaagcctcttttatagaggccttaatcgcattcgtgagggagcagccctcatggcctaattacctcttaaaggctctatctcttaaaactactaggttggcaacacctgaatttaagagggggcataatcaaaccatattattactaatcagttgaccttaaaatagataatcctggatgatctcggtgggccccttgtaattacaagtttccttaaaagtggaagagggtgacacaagagaagtgagagtgacgtaatgcgaacaggactcaacacaccattgctgactttgaagaaggaggcctgaatttcaatagccacggaaggggacaacctttagaagctggaaatggcaaataatactacccaaaagccctcagaaaggagttcaaccctgacagtacctttattttagctctgtgcaacctgtttcagactgctgcagaaccgtaagataataaattcatgttgttttaaggcactacatttgtaataatttgtcaaggcagcaataaaaaaccaatgcagcaaaagacaataacgtctgtttaaccacacagtcacggaacatctattaactagcaacttattaaatacagcttactgctgcaacatctttggtgtaattaaaacatcctccatgaatcagagtgagaattatacttaagtgtctgccaattgccatgataakagaaaagcttatgatctctctactaagtaccttaggaagacaagggcccaatgatatgagcagtgtggtggaaccccaaacatcttcccactttcatgcacacatatcattcattctcctttttcccaaggttcgctgttagtatagaggcacaatagatcatgattagctctgggcatgttcacagtttagctgcctgagcagattaatttgagagtccaggaaaagcttattaaacagattatgagaactagacaagacttttgagaccatctgtccaaaactttggttttaccagtaagcaaattcagacccagcatcactcagctggtaggtggtaaaactgagaagagaatccatgtattttgttttttcctagttctgtgttgttgcactgcataatgaattccagccagaaccacacattcagttcctgactagtccacaattagaatcaccatcaagtcaaacacaagtgaggcattacatccaggaggtcatagttagttgtgtgtgtgttccctagatagattccctgaagctttctcatcaacaccaagaagctgaaggggaaaatgaaagttccccttcagttcccctcaattcaagagtaattgagaccaacatcattcatggatattaataatatgaccttttttaaagaatcaccaaatcattacatcataaagaacaatgatcttatattttactaggtttattagttgcagtctcagcctctaggttgctagaaagctctgggctcctttggatatggacatggccaaatctctttaactttctagttatggcactttaggcaaattcaacttctctgagtctaggttttctcctctgttcaatggaactgacaattctatgtcagagagctattgtaaggattaaaggaactaatatttgcaaaccccatactgttgcttggaataaaacaggtgctgaataaatggtagctatttgattgttagttttaaaaaatcttgctagaaatcattaagagtgtatttatctaagtgggggaaaagaaaaacctaagtaagacccttggatcttgaaagaaagaaaaagagagaaatgattgtcaacacaaacagaaatgcttgaggaacttcaagggctcaagagtcaaaggacaggctagaaaaaaatgtcagagaagaaagagctaagagaagaaagtcaaaggaaaggagagaaggggagaatggaaggagaactgagaaaccagcagtgtttttttaaaggtgataactgaagaaggtgagcagaggaagaaagaacacagtgagtaattgaaatcaccagttattttcttctgattcatctcttaaaggaaataccttctaagagagatctttgctcttttgtgtgctggtgaatgtaaggtgagaatctctcctttctttttctaatgatgaccctgaacaaggccgtgctcttcttttaaacatctcttctgtttgaagctctgttacaatagaatcaaatagggtctccttggtttatgtcactgatctaaggttgaatgatgtacttgacagatccttttgaactgccccatctgggaactgaaccaaagactggatcgccagtcatggtactcacaattacctttccctttccgcacagtccccacattcactacccgaaagtataaaatccatctcataagatgcagatgaagtagaatgatgcggtttcccaaacttgcctgattatacaaaagcccagaagcattgctgtctggagattcggattcttacctcaaggtgattcttatcattagaaagtgaaaggtacagaaatgaagaaactttcgagtaagcaacgtttcctaccaagggactgggtggttctgaatataacaccatctttctcctaacaatagaaggtgacattttgacaaataagcttaggattcgtattcttccctaaggtatcattttgctgagctatcattttttttctttctttttatttttgagacagagtctcactctgtcacccaggctggagtgccgcggtgtgctcttggctcactgcaacctctgcctcccgggttcaagcaattttcgttcctcagcttccagagttgctgggattacaggggcccgccagagtttctggctaatttttgtatttttagtagagacggggtttcactatgttggccaggctggtctcaaactcctgacctcaagtgatgagcttaccttggcctcccaaagtgctgggattacaggcatgagccactgctcccggacttgctgtaagctatctttttgccactcatgatgatgattgtatggatgactctctggtctgtgttgtcagtattcaagtggtacctccactctgtcacatcttcattttgcttgtctagcagacttgctagtcccttctgtcttgttccatgtcaggcttggacatatgaattgcaatcacattgtgagacaattaattgtccaatatttctcaagactccctgtcctttagaaactattttgcattcatctttgagtcctcagtattttgcctagtaaacagggtttgtcaagtgaatatccaatatagactcaggaagatccacatggggagtgagaaaattgagcgaatcccaggaaaagaacaggaaatggaggtaaaagactcacgtaagtttacccttctatccaggcatgcctccagacaccagcttccacttccttatctgtctggaattggtgttgaattgatcttcgaggtcagtttgaggtttcttactctctatatgagtctctgatacttagaatgttattttgtgctcagattgccagaaatcatgaagaaatgaaaggggaaaaatggtggcaataatgatgactaacaatgttttattgtgtgacatgaagttaaacagtaataatttattgttatattgaatgctgcagcattaaactgctgcctccagtgttaaaagcaatgctcacaagacagatcttatgagaaactctatgtaacagcaaaggatcactgaaatattcagatacagaatttacaatagttgcattagggcttcctttgaattaattaatatttcctctgagatgactcctgccaagtggttttgcttcattcctgatttaattgctaggaaaatcagaattattccagaaagtgaggctatgaaggtttcattgtaggaaaatcttgtgtctgaagccgtgaggctggacaaagggaaatgagttgaatgctgttgtgaatgggcagaagtcagcaccagcaacttccattcatttcgaagtaagagttgataagagaattgactgttgaagtcaaatctccgtatattttcttatttccttctttgcatccatcttgcaaagcaaatttttaagagaaaacgagtgtttcattcttgatagtgaattgctctgcttcttcagcaggaggtgcaggagaaatcctatttgcatcctttccactgctcttaacaagcccctaaaggctgagttaatgtttatttgtggcctggagtggccaaaagggaatagcaggaattattttcttcatagaagtggtggagaatatgagtgcctccctctataaactggagaagatttacctgcacaattctcctctctgctttttagtactgcttgggggatgaaagggacccatggactttggcctcagacacaccaggctggtttcaaattttccttttttctgaaatccacagtaagccacttaaactctctaagccacagtattctgttctgtacaattggaataacaatgctgtgtactggaacagcttcataatttgtaggcccagtactaaatgaaaattgggacccttttgttcaaagaacatgaacttcaagacagtaatggcagagcatcaaataggtgtgtggcccttctgagcatgggggctgtaccactgggcaggccacataccacgaagttgacctcactgtgcagctggattggctgttggatgtcagatatctttccctttgtatctctgtatctcagagagtggatccctgaaaatggcatttgcactggctgctagctagatttagccatggaaggcagtagtaggagactgatggtgagaggcacggggaagccaagttatttccctcttttctcctttcccctgtctctatttccctttgaaacgtatctccaatagtaactgctctcctctttcagttccagcatacctaggacagcccaccttctggggtcccacctttcctgatcccactcactgctagtcagttctctgcaggcagcccagctcctcatgctctaaaaccaccatttccttggttcctccagcctgacaggtgctagctgcttcctgatataactaatatcttgactacctccctgttccctatgaggcatttcagctcttccaagcctctttaactagttccccttattaactattctttattcttcatagaatctgatataagtgtctaccttgaaaggttattacaaggaacaaatttgtctaaggcagtggttttaactgtacattgcaattcatttgtgagtaatacaatcagtttgatgggtcaagaccggtagtttagaacacaaaataacttagagcagaataagaaaacatggtagtgcattgtatgtattaaggtacatatgatttaataaagcttttagttgtctctgtgtgtatgtgtgatgtgtaccatttcatgctgtaaaaatgtattactttctagcaggtgggagaaggaaagaaaggccaatggtctaagacttctggtacataattagcactcaataaattgtagaaactattgttgccatccaagaccatgccatttaaacaaaaggcagtcagacagcccaaagagtttaccattccaactcactttagctcattagaatagtttcatgtagttgggccaacttgtactaaaatggccaaagcgtttacttacatttgtttgtttacacctagacaggcccagcttgagtcaccagccttggctgaaagagaagccagccaggttcaaagtaaagaaacagttttaaaataacattttatttttctgtgagtcatagcaaatctgtccctgcaacatctttctcctgcagctaaatgctttaaaatggtcaggtctcacccaggaaagtgggactgggaggaagtgatgcgataaaacagcttcccaatcagtgcattagtaggagtgcaacctctggcattcctcttttttcagaagtatcaaaaagctctgcagagataactgtgtctccagatggccatgagattggtaaatgacaaatgtttatcagcctttcagcacctgctgatggaagaactaaaaaaaaaatcgcaagtgactttatgagcccacagccaccccagctgtaatgggtgctagtagctctgtgttgctgacctcacatgggtaaaggaagagcagaagaatttttagtcccttggctacttcttatctatttcatcaggtaaggaaactcaacttgaatcctttcaactctgaagaatggtagatctgaggaacaacaaagagctataggtcatgtggatttctctgctcagtcagagagcccagaactctccctggagctgaagatagcccttgcaagctatctcatgatggttttatagcacagtgggctcactcatactggtgctggttttgagcatctatgttgacaagacaaatgtctgtttctactactgcagaggatagagtttaaccaaagtcaggtgacagagaaaaagaacagaaactgataacacttacacagtatccttatatagcaggctcttgaataatgcaggcattggggtgacaaccacccttacagtcaaaaatctgtttataacttttttttttttcagatggagtcttgctctgttgcccaggctggagtgcagtggcatgatcttcgctcactgcaacctttgcctcccgggttaaagagattctcctgcctcagcctcccaagtagctggaattacaggcatataccaccatgcctggctaaattttgtatttttagcagagatggagtttcatcacgttggccaggctgatctcaaactcctgacttcaggtgatccacccgcctcagcctccccagctgtgtagataacttttgacgccccacagccttaactattaatagcctatcattgactagaaatcttactgataacagtcttttaatgcatatgttatatatatacattacactatattattacaataaagttggaaaataaaatgttattaagaaaatcacaaaaaaagagaaaatatatttactattcattaagaagtggaaattgatcatcataaagtcttcctcgttgtcattgtcttcaggttgagtagctgaggaggaggaggaagggaatgggttagtcttgctgtctcaaggatggcaaaggcagaaggaaatccgcatgtaagtggacccacgcagttcaaacctgtgttgttcaagggtactttatgttgtccgggatgctatattgagtactttatacatataaatttacttaatcctcacaacatgcctacaaggtggatactactattgtcctcatttccagctgagaaaacagatagagaaggcaaataatgtgctcaaatctgcacagttaattaatcatagagcccaaattcaaacaaaatagtgtggctgccaagtcaatgctcttgacctctacccagactgggagccagagggtttgcattctaattttatcattaaccaatctgactgatggggcaaatcaaccctactgcaatctcctcttttcatctgtaatataaggttattgcttgagatattttcaagtcttagtgccacctcccatttagagctttagtgttgagaaagatgatattaatgtattccgttgtcctaaatatttcaaacacgtcagtttctacttttccagacaactccaatggggatatttttttattcctccacttcctaattaaggctgaaagggccccatattcagctgctgagtctctgtctcccgccttcttttcctcctgtacgacctaaaactgtcttttgtctttcagcacttggggagaaactctgggaagctttctaaatccctaaatttgtcacacccatccttaaagcagtgctgaattaaaaagtgggattcgtctaagcagaggagatacttaaggaaggagaggggctacagcactaaatgatgtttccaattaagagaagtgtaaggtcagagagaaactccctcctggatggagctcttcaccacctgatgagctgattaaatatcatgccgcaaaaagtaaatgtttactccaagccaggtgcttggactctaaagaactctattaggcaagagtaagtggtttaattggctcaccttcattcaactgttagtatgttcctcataagtgcctgtcagagagaatcttttgtgtttcccttctaacagctggctcataaaaacataaactcatcttacaatgttaartaaggatcttttaattcctgttttctttcctccaatttgtattaatatgataggagagaaagaaagtgaaagcatgcttctatagctggctacttcatcaaacttaatggaaccatattttgtaattcattctataatttaagttttggtcattttatctcttaaagatgaattccaggccaggtgcagtggtttgtgcctgtaatctcaacccttgagaagccgaggtaggatgattgttagagcccaggagtttgaaaccaaccaatatagagaccctgtctctacaaaaaaaaaaaaaaaaaaaaaaaagtcaggtgtgatggtatatgcctgtagtcctagctactcaggaggctgaagtgggaggattgcttgagcccaggaggtccaggttgcagagagccatgatgatgccattgcactccagcctaggcaacagagcgagacactgtctcaaaagacacacaaacaaaaaaatatgaaaccctagctaaacactgtggactcaaaatamcctgtgaaatcacccaaccgtagtatttatctatgagaatgtttcaaagggagatatgtagttgtatgactatttcacgcagatatttgttattaataaaagactttgtggtcagcatgacgtgttagctacagttgaatccatgcttctttacattttgtggtttggttgttgtcgaatttactttccatgcattatttccaaatatatacttattatttcatcagcttagaatggtttggatagaaaaatatatcaaggtctcagaaatgccccccattaacataagggtagccatgacttgaacccaccccactggtttcctttgtctttctccatttctgattctctttctctgtggttacctaggatatataaattacttgactttgaaattcatgattaactcagaaagttatagctagtgattcacaatatttgttttaaaaacagtatgaagaatgtagaagcttggtttttaattataataatataaattagtatcattttatgtactcaaatgccacacacatatgtataaggcattcctatggaataatcttaacctggttctttgacaatttttgtaattcattctctagtgaaatatttccccaaagtgtatccacagattactatctcaccaatatgcttccggaaaaaaagtgccatggtctaataagtttaggaaaccttgcacattctttttccttgggatcaatcattagtattagcagatttagcactaagaaatcctgtagtagagaaattcatttacttttaattcagtatttctcaaaatcattttaccctattactcaaatccctgcttttattctgggaattgttacctctcctttcctttgcatacacttgagaaattgactctagaaatactagccttatgaaatattgatagtaattgctatggtttgttagactcctccaaatctcttgttgaactttgatccctagcattggaggtgggcttaatgggaggtgtttgggtcatgagggcagatccttcatgaatacattaatgccctccctggggtgggtaggaactgagtgacttgttgctctattagtttctgtgagagttgtcccccgactcgccgcagagctggttgttaaaaagagcctggttcctcttccccctctctctcttgcttcctctctctccatgtgatctctgcacacaccagctccccttcaccttctaccatgagtgcaaacagcctgaggccctcacagatgcagatgccagatcattgcttcttacacattgtgtagaaccatgagccaaataaacgtcttttctttataagtaactgagcctcaggtattcttttatagcaatacaaatggacgaagacagtactgattatttgttgggcatttcctatgtgcgaggaactgttacaggtattttggcagttgtaatagcgaggtatttattttggtgctttaacagagactaaaatggctgctttaaataagattgattatttctctctcacatgaaagcctaaaatggtgagcagtgtagcaacttagggcagcaatctttgggtcatccaaggcatcagataccttctgtggtgttgtttcaccgtcctttgaagtgttcctttcttcataggttgaaaccagctccttgtacctcatctggtcccatccctaagaaaagagaccaaagagccatccttgagaaaagagaccaaagagacatccctgagaaaagagaaaataaagggcaaacagcttcttgttaagaatctggtctggattatgctcatagctcattgtccaactgaataaattgctcaatttattgagctcataaattgctcaatatgacatggccatacccagcttacaaggaagtccaagaaatagtctcttattggggaacatttgctctcctgaaacatagaaggttctattatttaataggtagaaggaaagaatgagtattacaaggcaattagctttctctgctgtgtttttacctcattaaatcctacctacaacccatgaaatcagtactttgtcttcattttaatatgagaaaactaagatacagagaaagtaaaactaaagtcacgtagcgactattcgcttttggttttgataccatgctacctaattccatagcctgggttcttagctgatacacacagttgcaatgcctttccagaaaatttctagtagtttccaccattcctggacctattcttttctaactttaaaggcaatccatcttctaagtcagtgtggcagagactctagtttcttcacccaaaccatgttctcctgtctttcttgggctcatgtttaaactatatttctcatcttctcttaggtattaccatatgactaaggtctagtaaatgcaatgtgagaagatctgttgtataccacctccaggcttggcctgtaaaaacttcccatggacatgagctcctccatgccctttcccctccagctagatgaattggaaatgacacccaggacaactggaaggccatatgtcaaaatggacaaggcttgctcaccctgaattctagaataattttgtggaggagaactaccctaacaatctgttttcccacctagcaaaaaaaaatgtgaccacaaaaataaacttctgctgtgtttgatccatttgaaagtttttgatctattagttctagcagttagcttcctctaaaaaatacaattgattaccatgatgtcatggataacaagttggcaacctgggtcaaagtcctattcttgtttttttctagtgataagaccttgggcaatttattaaatctctccaagtctcagttttctcagctttaaaataatcttcaatcatagtgttgttctaagaagtaaattagtttatcttaaaaatcctattccctgttaattattccattctagcaatcaatttgtgcttattctagttgtcccactgtttaaaacacacatgccttagtattatgaaaacatttcaaaagaaatatgtcttagatttctacatttatattagaaaactttcaaatttatacttcatgccttttaaaaaaataatactagtaaaatgaaagaatatcagttttggaatcattccacagtcctggataaaaatacctgttagaccacttactagtggtatcatctatgtgagactcaaattcagcatcagtaattttggaagaatggtagtcctactttcagaattgttaggattaaataaagtgctaaaagtctgtgaaatctccttgcacactgatgatttcccttctctccccaaatagatttccatatggagcacttttagtcatttttgctggactgcaatcacctttctttcttcaaatgttaaaactgaacagtagtagctagcaatttggaatctctagaaagaagttttttttattattatagtgctgaagctcagctcattctctcaaggagcctatggatttggagtgcatcataagggaagaagttaacctcctgctgtattaccagagaccaaggacaaatgttggttgtcacctgcctaaccaggcaagtgatagtcacagactgtccatctcacaacaaaacaatgctaattttgttgagggatagaaatgttgtagttgatctcattttctctagcacagtgtccctttttgaatgttccttctcaaatagggcatggtataaactctgcaagaggggagttccatttggaagacatgtaggcaaacaacattcaggctccacacccacttcgcctgctgagatttgacttattacacaactgcagatgctggtcaattagtttctcatactcattcgtatcacagaagggatgcagtggttataaattgcactgattatgcacaccttggcttaccctattgttgcataaaaataggcaaggcatgttagtcattgcatagtcttttcagtagaaaggaaaagtgattgagaaacagcaaggaaaattgtgtttacagctaaggtttttgttttgttttgttttgtttccactccgttcagtgtgtatataaagttaatgcatttttaacttaacagcaaccaacaacagcttcactttgagtgcatgaaaaacactggggcttaagtgttgatttgttgccaggcatttcctttgggaatccatgtaggctgatcatttacctgggaaatcgtgtgtgtgtgtgtgtgtgtgtgtgttacctttacctttgtaagggacatcataaaacctcaatttcctggtgtgttccagttaattttctgctttattgaatgtcactctgaattccctatttcctttaacttttgtgttgaaaaatcattcaaaagactactgagccattttcttcttcattaagaaaaatattgggttagacttaattcttgatagctgaaaattttggagcattgttttgtttgtttgttttacatttttgaaacaaactattttgagaccgtaataagaacaatggataatcttcccagaaatcagagagagaaagagagagaattctgcataaatttatagatccttgcagcccacatttgaggccccagcaatagaccccaggttaagaattcctgccatagagtgttttgacattatcattctaaatatttaattttgtccaaataaaaatatagacagagaaaagggaacttagcaaaaatcttcatttacattcaaaacaattcaaggtgcattaaaatcatgaaaaactttgttcctctataggccagggaagtttcttgctacttatttcctttattaaagtatattttattgatttgtctttttcttttaaaaacagaatatccaatgggtaagactgaccaaagatttggggaagttgattctaaataggtgagctgtgttttaagagttcttcttagtactcttcaactcagcatgtggaaataaatttcaaaagcttttcttaatttcacaaaaacaaatataaatagttatggggggaaataaacaacaggccaaataccagatggcaactcaaagcacattgtctgctctcttgctctaagctactggttctcagtaggggtgggacagctcccaaaagggggtctttgggaatttgtggtgggtttttggtagtcacaatgttaagaggtactataatagctatttagatggcagagttaggatttcctgtttctttttctttttggtatccctcatgactatatagtctccccaatatattcacatgggtgaaaatcctattcgtaatgattgaactcaattataactccatttacagataaacatgcacaaaattttcatggttttaatacactgaattttccaagggtgtgtgaaattgctgtacatattgacagaagattgttgtttgatttggttaagaactttttattattattattattattattatactttaagttttagggtacatgtgcacaatgtgcaggttacttacatatgtatacatgtgccatgctggtgtgctgcacccattaactcgtcatttagcattaggtatatctcccaatgctatccctccccgctccccccaccccacaacagtccccagagtgtgatgttccccttcctgtgtccatgtgttctcattgttcaattcccacctgtgagtgagaacacacggtgtttggttttttgtctttgcgatagtttactgagaatgatgatttccattttcatccatgtccctacaaaggacataaggaaatgtggcacatatacaccatggaatactatgcagccgtaaaaaatgaagaacttttttaagagttatttttcactttagaaaatcagctagagaccacaatgctgtttatggtattgaagtccccatgagaatgcacctggatcagtgtacatttgtaatgatcagattcacagtgattccatgtgtaggtataagcttttctctacttcaccatgtgtccttgtatagttattgataggggttggctgtggccccctcccaaatctcatcttgaactgtagctctcataattcccatttgtcatgggagggacccaatgggaagtaattgaatcatgggagcaggtctttcccctgctgttctcatgatagtaagtctcatgagatctgatgattttataaaggggagttcccctacacaagttctctcttgcctgccaccatgtaagatgtgactttgctcctcatttgccttctgccatgaatttgaggcctccccagccatgtagaactgtgagtcaattaaacctctttcctttataaattacccagtcttgggtatgtcttcattagcagcgtgagaacagactataacagttatcctgcatcttaacatatttcaatattatttattatatacttatatataataatataaaaatattcattgtgcatttatatatcataatatatatattatgtaatttttcattctgtcttataatttattctaaaaattatatttttaagttaatttataacttattaagtcagtgtttctttaggaaatgtgccctccgtcaaaattttattctttttggtctctttgctagtatgctactagctaaagaaaattcattcccactaattctggattcttatagttattcacagccatgctgttaaagagacaagtgaattactaccttctcagagttgaactcaagggggaagtttgactattggctggcaaaataaagtagtggaaatttatttcttttgttctcaataaaataacctgtgaaccatcctaaaactaaaaaaaggaaattatttatgaagagaagttgtatcatttaaattcgttttctctcttttccctttatttcagaaaccttccataataaaaacttggatataatgaaattttgcataaatgacatgtgacaacctaatttagtggaagccagggaacctgctaatactttaacttcaaagctcttccattttattccttcattacttttcctcctttcaaagcattctttagccatgcaccaagttcgaacaatgacgaatcaaatcctcagagccaagaacaatgttctaatatttccatgcaattaattgctacttcttggtgagcatccagtatacttgattctctcatagaagattctccaagcctgacactcggttgaagtctgaggacttcactgaggacaaagagggatcaaatcttcccaacaaacagtgaactcaccatgcaaagtgaatagaatcccctaatcaataaatcactaaatatttatggagccccgaaatcatattgtgacaagatttttcaaaaaaaaatgtagaaactaagttatgatacaatcacatgtcaggaaggtatattggagtactacttgtccaggactccactgacacccccttgtgctccctatgtcattttgatgtaccaggccattcactgtatctataacgtgaatttttgcccctattttcaatgtcccccatcctattagcttttcctttccagtaaacttctccaaacccttcctcagtgtttcaaaggcaacaaaagttatcacaacaaaagtaactagtatttcttgagtgttcacagtgggctggacaagcaaagtgctttacctgcattgcctcagttaattctcttaataacctatgacatcagctctattattaacctcattatacacatgggaaaatagacactactatgggctgaatatgccccctccaaaattatgttgaaactaaatccccattttgcagtattaagaggcagggcctttttgagtggccagccttcatgagtggattagggccttatgaaggggctggagaaaactaacttaggccctttttgcctttctatcttccaacatgtgaggacatagcatttgcaccttctaccatgtgagaacacagcaagaaggccctcaccagacaccaaatgtgctggtgccttgatctttgacttcttagtctcagaactgtgagaagtaaatgtatattatttgtagttacccagtctatggtattgtgttatagcaacatgaagccagacagaaaaatttacagttttcatcacttggcagaggtcacataacaggtcgatttgattctcaagccgtctttactattatgcttacttggcttttatctctgtagactttaattgctgagttatctttccctgagtcattgctgcttcaaatctcagtctttaggaatcacttctgtaatctgctgattaattatgcatagatcataaaagttatttaatccagctgctgtccagagtcaatatcactatcctactcaaaaatctgcaacaatctaccacgaaaaatcaattctaaactccttagtctgacattaaacagcctgataatctgatccaatccagcctctctgcttctacctatcttgtttacctgtttgttgattcttattcaattgcttccttgatggaggactttcccacccactccatcactacctcttgtttctgcctgcacacatcatttccccaagtcttttgataagaaagatctcctttttacaactatttctctgctctctcctctccaacatatcttcctgacatgtgattgtatcataacttagtttctacatttttttgaaaaaccttgtcacaatatgattttggggctccataaatattttgtgatttattgagtaggggattctattcagtttgcatgtggagttcactgtttgttgggaagatgtgatccctcttttctctatgcttccatcatgacctggatatacttctagtatggccctttctaattcttcacatgcatgccttcactggactgcagactccaagacaggggccatgcagtattcatctttgtgtctttccagttactccacaacaatttattgagtgaataaagaaaatgctgagaaacgaactcaagaggttttgtagatttaataccattgctctgggtatcgcaaaagataatggctattaatgaattagtaccccacttcccaccacctcaccctgttgacatagtatgatagaatgtgtaaccacttaatctaccttaagatgctattgggcaacaacaatgtcttgactttaggggctggaaagcaaatagtatataatgtccaattgctcttgtttggggcagagagcacagatttaagaaacaaggatacaataaaatgaaatttggctgcagtacaaggttaatgtctctcctcacctcccaaagagtaccaagggatcattcattgtcacagctgttggggtttagagctctcttctcatccaaatgccagtactttccacaaaaagctcttccccagggatgccctaataagccagtgtgtcctgtataggtgagacttgccctggctgtctctatccaagtggtgacataagctcatctaaagcctttcattaatgcaaacaatgacccagcccatggtggcactgattcttgaagctgaagacttggagaaggagcctgattttccatcacactgattgttgttttcagtaagatgtttagcttttcaattttctctctgccaaatacaaattagtgtatttccaacatcccagagtcttagctgtgcattgccagcttccactgcttctccttaattaacaaacagctgtagaagagcttctcaactgacatggggggaagagctctaaggaagatatggactatgtctcatatcttcaaatcctccacagtcatctcctgttagatcaccaagaagaaatgcccagtggagacacttcagttcaatgaaaagtttatgactagttgggtttggtctccattttgtattaatgtagttgggttcagtctccaatctgtatgtatgtagtttcctatcccagagagcaggacaagaccatataagctctatttatgtttcctttgactctttagctgaaagcctaggatgtaggacaagtggctaacctgttttagaactttcttcctasgctaacattctgaacttggccttgtggattttacctcttaaactgcaccaaaaaccatggaaacaaagggcttacagcagtgttagcctaatctgagccctctataccttcctatactgtggccacagcagtaaagctacgtggtcttgcaaaagaccttccaagagaaggttggctacagaccttgcttatcacaccatgaacctgaggaggaaagaaaatactcacaaatagtttagcccctttcataaattgttggtccttaatccatttttgaaccctactctgttgggtggaatgtgtgtgtatctgcacgtgtgtgtgtgtgtgtgtgtgtgtgtgtgtttagaaattcaaaaaaaatgaggagatcttggtcttccatagagggaagactgcattatcaatagagtctttcttagcagaggatgaaggctcctgtagctcctaatcttcccatttgtgcacaaatacstgaattctgattaggttgaaatcaggaagacactcttttgctgcttagtggccacatctagagctaacaacattatcagtgggatggtgattcatggtttaagaacataccctcgccattccagctactcgggaagctgaggtaaaaggatcgcttgagcccagagtttaaggctgtagtgtgccatggtaacacataactagccactgtactctagcctgagcaacatagttagaccccatttcttaaaaacaaaacaaaaacatccttctcctcttctcctcccccagcaattctggatggctcatctaataaagtacatatattttacctaatctagtcaaatgtaatgacacaataagattattattattctccaatccctgctctgcaacatatttggctgaacatttttggctgcaacatttttggctgaagagaatgaggtttcttcctccctgaacctgggaactaacatgaggtgttttcttccacttggtggagctgtgcacatgtgtgcttgcggagaaaaagaagagtcccagcaggccctctactccagctgttggagattgagctttccagtgcattatcctggctttatgcagtgatgccttccccctgatggcagtaaaattttaattagagggcaatgtgcattcctatataatggagtgcacacatggcaggaagttaacaggacacgtttgcagttccagtttcattgtcaaccagctgtgtgattcctggcaatttgctttattttgttgtgtcacagttcttgactaggtaaactggagagtcatctctggtctactttcctcttcagtttggtggaagtttcacgtaaaattacatgtgaaagtccttgagaattgaaacaatgggcaaatctatagcagaatgcttgttgaattctatcagctttcccaaggtgcaggctgcccatgtttagtctttctcactttccaatccattttccacactgcagccagcgtgttttttctcaatggaaatctgatcatatcaacctcttttttaaaaaaaatcctaaatatcttctccctctcacagaataaaaatcacaattccttaagaaactgtcaaagccttctcaatctgtgcctttcatctctgaccattggtatctttcttctgataggataaaagttcattgaatgttcaagccttctcttttgcttttcagagcttggccatgtggttttctctgtctgaaacaagcttcccccattcctttctaggctaactcctactcatcctccaaatttcagcacaaagtcacttacagtgggaatgcttccatggccctctattagcagcctctgatttatgctcccacaatagtcggttctgcctctggaccatgttttatcctattgtttttcctccataagagcacagtcataatctgtataactcagtgttgtaactctggcagctagcacaatctcaggttcataaaaagagctcaagaaatatttgttgaatgaccaattagatggcatattcatttcctagggctcctataactaacgctagcgtggtgccttagaacaacagaaatttatcctgtcgtacttctagagggtgggggtctgaaatcaaggtgttgtcagggctgtgcttcctctcagattctacacagaatcttcccttgcttctttggtggcgatcagtcctttgcatgctgtggcttgctgctacatcactctaatctctgcctttgttgtcatatagcattcctcctgcatgtctctctttgcacatggcattttcctcttataaggaaaccaatcacattggattagagcctatcctaatggcctcatcttaacttgattacatctgcaaagactctatttccaaataacgctacattcacagatactggaggttaggactttaacatatcttttggaggaggatacaggtcaataacagattgctaaaccaattaactaattactaattaatataaattatgggtggaaaaagcttccccagatcacgataaaaagctgtgtcgatctaatcaacgtgcttgcttaaataaggcatgtgtataatatatatgcatgcatctgtgtatatatacatatgtacacatgcattaattatgttgtgcaaaaaccccaaaggctatttatcccaaatagaaaatattgtgtcgtttgtctaaagcactttaaagacatctgcctttttcatatgtaaatttcttggatgacaagaaattactgctttgctagcttttaaaacactaaattatgataatccatcaccaaataaactataagcttctatcatttaaaaaatgtaagaactctgaggttagtagtagtttttagttgccattgaaagacggcagtttaacgtcatcgtttattcagatttccaaattaaggagatctctgtggttagacattcctttcgttatcactctccttttcttcaggcctgtcatttgtccattgatgtcttttccttccaaatgattcatgtacacattaggtcttttccctaagcctcatattatgaaaagcaaagctacatgaaaaaaagcaaatgattgctaaattatgtcctaatttctagcattcagcagtgctaaaatgaagcagagaatttcacaaaattctcagataaagtatatttttaccaactaacattgggtaaaagggactgagatagagatttatttttattattattaataactttgaaaatggtgcatttgggaaactacttactaatgttcattggaattggtggtaatactgaggtcaggatttaattccaggcattacccaaaaagtccatgtttgccttgtttcaagcctagagttcttaaaacaatccctgcaaggaaccaggcataaattatctttcagattggtgggcgtaggaatctatactgcgagctaactgtgctgaaatagacattttagaggatgtgaatgtctatctcagacaaaggagattacaggttattaaccaaggcacttttcaaatgccatccctttgggctttcttacttagagtttcagattcatttagccaaataccagccttatcccttccctaattttcctaaatatttgtggctgaatatacttttagctttaggagtgcagaagactttgagggaaagaaggcagggttgaaaaaggatgagtttcaggtcattacattgcttcaaggcagtttgcagcttgcattcatatttttaaagtctaaattagagccctttaacaccaactatcttgggcacacatgtatgtagaagcataccaccatatggcaaaaggcagagttgctaaaactataaataacaaagaggaaggttaattagcaaattaattagctgaattctatacaaggtactaacaataccttaatttccagatacatttgttatcaaaaatgtctaccttaataaagctgtggggacttactaagtgtatttgctgggcatggttcccagttatgaaatattaataccttgaaaaataaaacatgcttatgaaaatgcagttatgctctcattttcagaggaatatgtaagtgaggaataatatagaaatcctaaaacaactggaaattcagactaaaatgaagtagactgtagttttgtcattgcatgttctgctcatactaaagcacctatcctcccactttaccttctttaaactgcagggcagagagttatatttttcatcttcatgttgagtagagaatccatgaaaatctaatacccagttatcactcaagtgtgacaaatagaaaggagcttcagaataggatcttcagttctaccaaatgtctctgcctaattacatcaatatccatgttgatgagtgtacaaacctgtggctaattatattttcacttcttctaagggtaggtacactaatgtgtgatcccacagaaaagggcatgaaagtaaattaaaggtgtgtgccatgtatattaatgcctttgtggttattattgctattgtcttactcccatggatattggaggattgttgataagacacttaaatgttgataaggcacctaatgagtatcctgtgtgataggagtagtacacaatgataatcatttccttctttgtgcattagtattgacatagccactaatcaggaactgtaaactctaaacttgtatctgcagccctcttattaaaaagattcctggatttttttccctaagctagaaacagacagacaaacaaaaacaatgattaaagggcactaaaagatatatttaaaggcagaggtttttttcctatgtgtataagattcaaattaaattcctctttttggctatttggacagttttggcaattgggctgaagccactatgtttttgtcataacaggtcaaggattgcttactcatgtttgagaagcaataatgatatggcaagagagaggtaagggactacaatgggaggcttattaggaattgtgcatgcctctttcatgtgtgttgtctccaagctaaccttgtgaggtacgaattatgacttcttcctgaaggagaaaagcaagttttagattaagtgcctgacattctgatgtcataaaaagactgaaataagcaacattttagcacaacatttgaacagcccttttcttaaggataagctctttgctctacaccatactaatttccaaaaaggtgtgagattgacatatgaaacttgtacgtttatataaatgtgaatgcagcaagccagagaacagaatgttctgtagcccaggcaagaggcagaggaaatacccagtgacagatctacttggccctcgactaaaggggcgctgtaactttaaaatactaataaatatttagcttggctttttctttcctatttgctaagtcctgtcttgattctctggctaaggggtgtaagaaagtggctgtttgtgataaatagttgtgtttgtgtgtgaatgcatggaagaacacatctgagataatatagtgtttactgctttgccattagcacaatgggctgtctttacagaatatgatgtttaaatctatgcaccagtgcactttcaaatagagaattcgcttcctgttttcacttaaaactctctttttattttaattaacgaaaaagcagtttaatcatccatctttgcagctaaggaagttttacaggcttataatactgtcagattctgcggtatataaatgagaaatagacacttttggggaagaaattggccagtcttccttccttccttcctttcttcctttcttctttccttcccactcctcccccctttccccccactctctctctctttcttcctatgaagagactgttctaaaagctaggaagtttcattgatggtgtgtgatttcacaagctggattttatttcagaacacctgtcaaattcagagctgtctgaagcttctccaacatcattaccccagggctcccagttctatgcacatgtttttataatggcaggaaaaagaattcatatacgcatttgtgtgttagaatcagtggtgtgctggtgtaacaatcagctcctaragggtgaggcagggtgggtaggggatgtttagaaaaagtgggtatggagaagtccctgaattctagtttttgccaaattctgtgatgcaaatactcccaccacagccaatttcaaggttatttttcccagttacatttaatcagggccatacaagatgttacaagaaagaaaatgacaggaacccatgtggttcaactgatactcactcaggagctgagatagcatttcatttatgcaattcaaatagctattggtttggataccttagtattgtttcttccaagaaatattttcattctttcctaaagggataataatagacattcatgacctaatttaggagataatcattttttattttatcactcattattaatgcttcatacgaaaactagatttatgaaaaggcccatggattttacatctattatatcatctcctgttggtttgagaatgaaatgtttgttttgctaatatgtttttctgattaagaagtggaggcagcaggctattaaaagtttttctcaaggcagtaaattggtagactagatatcttcaaattaaaaagtagtgatttcttaggcctgttcatagattattcaaaaatgggttaaagcacaggttgaaaatacttttatgggccacaggataatttaagtgattatttttcagccacttttttttggaaaacatatattagctaatgtctgtaactttattaacttaaaaacaaaagtccagataaaagaattttacactctgccaagcagtggtgcccagcttataggtggttggttctgcatcttacattttgttacttgtaaggtctatgaagaaaggactcccttttctgccctgctcactgtcaaaatttcagtctctacagcatgaagactctacatatagaagacactaaaattttttttaaatatatgaatgaagcagttaatttaaggcagcaaagtcacgcctatacattatttctgtaatgtttaattttaagtataattgcttattaagtagataggatgcttagaaactatatttacctggaagtggcttaaaaatttccctatagacaaaaaatataatttgaagtagttcgtcttcaaaataaaggcctccagatggccagatacctttcatgtacatgcatcaattagactgtaccagaagataataaaaagaatcctattgttttaattatctcttttattctccaaggaacccctattcctgccaattcttacagacgttattaaggcattcagttagtttttcattcatttatttaaaaaatatttatcatgccaagtactatttaaatggtggagataccaaagtgaatgagatacatacaaggggccctagttctcaaggagctcacattcatgagaaattaagttcacacatgcaagatataccagatattaataagtattactcagatcattaaactagaatgaggccaggcacagtggctcatggctgtaatcctagtgccttttagaggctaaggtgggaggatagcttgagcccaggagttccaggatacagtgagctatgatcactccactgcactccagcctgggtgatagagtgagaccctgtctctaaagaaacaaacaaacaaaaagtagaaagatttgacctgagaataactagatagctattttagatcaggtattcatgaataaaataacacttaaagtgagatctgaatgacagaaagaaaagccatgcaaaaatcaaggagtagggtgtgcagatttcacagatggcaaatacctaacatggtgatgctaaagtcagcatgaacctccttctgtttcttgaacagaccacaggctggagaagaaaaggtaggaagaaggctggtataagatgagggtgaagagagaaccaaggccagatcatgggagctttatagccaggctaaggtgtttatgtttaattctaaatatagcagaatacattggagaagactatgctgaggaataatgtgacttgacttaaatttttaaaagactacctaactgtgtatggaaaatgaattgcatgggacaaggatggaaactagttgggagatgagttagaagattattataggagtccttgtgggaagtgttggtgactgttggagggtagtggtggtagtgaagatgcataggagtttctgagcttgttttggaggtagaggaggcaagatttgttaaagaactggcttagcagggtgggcacaaaggaaatacagaattaaaggataattccaaaggttccaacctgagcaactaagtagaggctggcatttactaagatgggtgagattgagagaaggggagtatcaggaggcaagattacttgttattttttagccatgtttacatttttttgagatatcttctgagtatctgagaagaaatttcaagtgggcaatttgttggacaagtttttggttcatgggagaaattaggacatggatgcaattttgtgagcctgtaacacacagctagtatttagagctaagggtctatatgaaatcacctaaatagtacttatagatatgaaagagaaggacagagcccaggggtactcttacatttacaggtgagcataaaaaagaaatcaaaagaaactctaaaggatcaaaagcaaagtagaagaaaaccaaacagccatgcgggagtgattgttgagatgttttgaaaaagagaaggttgacagtcatttaggaaggtgaggaatcaaacacagtgcagatgagggtggtgtagggagatcattctctaggtgccctttgcatttttgctcatcttacgatcagagtcactaactctcttggttcaggagttggaagatacagtggcctgttccagagcaaaggcaggttcagttgctgttcaggataatgaagataatgcctcccactgaggcaaagatcaacagagcttactgcccattataaaatattcagattccttaagcgcatggttcctctcctataatacaaacctcttgcaggtactgttgtcacctggcccttttcatatcaccctgtgaggagtggggcccagagaacctacacaaatgcaaacacttcaaccactgctattgtcataaagtccgtggtctctgacccaaagtctcatgtcccctgctagcatccatgaaacagtggcaggtgaactttgaaaacaggataggctaaaatctcagatccttcactactcttcacagatagtaggccattgtgatggtctacttgagctctgttgttgtggtggcatatctttctgtaccgatattcagttggtttgatgcaagcatggtacaggtagatgggtttatgccttagatatttaataagaatgccttaacacatgatcatatgtcttctttcttcactgacaatggcaccccactaatggagtgtgcaaatccaggaagaccagtgtttgaacgttgtggggtaaagtgccgataggtaagcccgcatatttagatatttctaagaggttctaaaatgatgaatactttcctcaatcatttgtcacaaccaaagtctatattcttatgcttagatgtcataattcatattaaagaattgggccttatataacaccttaatattaatagtacttggctaagcacagacgatcaacaacacttaattaatgaaactagttctgaatacattatatactttcagggtatataaggaggtaattacattttacagaggcatatactctatatctggtttattcgattgtgaatcaataaacatgggggttttttttaaaacatgatttctatgatgaatttttaatttaattgtaggaagctcctttaccgctgagtcaccagtgtcttcttgtataatataaagacattatggcctggcatggtggctcatgcctgtagtcccagcactttgggaggccgaggcgggtggatcatttgaggtcacgagttcaagaccagcctggccaacatggcgaaaccctgtctctactaaaaatacaaaaattaggcctggtggtgcatgcctgtagtcctagctacttgggaggttgaggcaggagaattgcttgaacccgagaggccaaggttgcaatgagccgagattgcaccactgtactctagcctgggagacagagtgagaccccatctcaaaagaaaaaaaataaaataaaagacattagccatctggagcagttaagtatatatttttctataaagcaatttaatgtagatgatattttctctctgtgtgtgcacaattgcatgcatatgtcaagtgtcgtgagattccaagtatttgacgatctgcttcttctatagacagttgggtacataaaaggagagccatgtgcaaatccagtctctggttctaggtttatacctcctcttctccacctccgctttccttgataacccctgatgcacacagccagccatcctcatccctcgagatgtggttgatttctctctatttgggtttcaggaaattgtttttcctcccttctgagagtctatgcgctgctgcaggccagtcagtattgattcaattctgggtgaatcctctctcactctttcctaagtgtatattgtatatgtagttcttctgccaaaagcagctttgtattaagattgtattaagatttaagttttcttaaatttgcaagtcacctaaaatatatcctgtgtctgctgggatccttttgatgttgaagcgtcttggagtagacaatagaggattttcatatggtggaagaatgttaggtgtccttgttggagaagagaggaagagtagagaacccctttaaagccctcttactgcctgttccttgcatctcatctctacatatttagcaatcacatctgctgatttggcaaacactaacagcagctacacagcgtcagtgaggacaatagtgagtggatttaaacatcaggggcgatgtaccagtgcaataaatagaatatatcattgtttcactgcggacagaatgtctgtgctctctatgaggatctgcatttaagcccaacacccaaggaaggcaaacatctaaagctcagcatggggtccttcaagcaggggaatacaaacaaagcatttttctcccaaaacacaagttttaggatttcatgtcaaagacatgctgccaatcagaagacagcattcccccttcttagagctggaaatggtaaccaggacacattggtatgcacaattctgctggctcagagcacacgcaagctcctaggctgtgactggcaggaggctcacagcgatttctttttttttgagacagggtctcactctgtcgcccagactggagtgcgcagtggtgcagtcttggctcactgcaacctcagcttcccaggttcaagcaattattctgcctcagcctcccaagtagctgagtttataggcgcccaccaccaagcgcagctaactttcttgtattttttttagtagaaacagggtttcaccatattggccaggctgttttcaatgtttttgaactcctgacctcaagtgatccacccacctcggcctccctaggattataggcatgagccaccatgcccagcaagctcacagcaatttttaatgcaatatgatcagacctaattttggctttttgatttcctcccttaaacctcaggcaggcactttttcaaaagagaaatcaatcagtcaatcaatcagtcaatcaacagtgagtgaatgaatgactaaattgtttgtttttagcatggcataaaataatccttaatattttgacctcaagcaaccattctgaccatatcttcttccatgcgcctttgactgagtacccagatacatgcagagtcaagttttctagatcacagccttgtcctctaattcagtgccttggtatgaaatctttcttcttctatgtcctttttttgccagatgaaatttcagtctttattcaagatcaagtgcaactgtctctttgaggaaagtcctttgaccgccatttctccccttcagaaggcaaacacctgggggagaagatctgcttaaggacctggtaactgacaaagaatggaatgggagcgagaaccgcctagccatcccttctccttgcacagtcatgaaacaaaagttgaaaaggagcctggttttacttgaccagtcataaattaccataaaataaaatgagatattaggaacctttgatctctgaaaaagtaatatgtgttgaaaagaaatatcactgttacatatagacaaataatagaaatatttgaggcatgcatttaaaatgtagaggccacttatagcaggcatattaacatgtgcatttgctttttaagaagtatacacacgtgtacctttagctttgaaagggtaagattcaatgcttgggtgatggatgcactaaagtctcagaagccaccactaaaggacttacccacgtaaccgaaaacaacctgtactccaaaatcaatgaaataaaataaaaaggtaagattcataaatagcaagttgagaatgcatgtttataccatgtagacaatgcatgataaattgttggcaataagacccatgtagctgactttggggatacaaagtagcttctgaaagaggttcctaattagccctgcctgaggtgactgcttaaggtatttatctgtagctggaatgcattgcctcagagacttgaggattcaggagctatgagtttcaaggccacagatgcagtggaatagtaaggcttcttcccctgcctggcacattgacctaactgatgagaggtgccttagggacccagcagctatggccatttatgtctagtccctcactctagaaaggaattgcttgaataccacggtgctggagtttgtagccacaatgctgaaggtcagggcagtccttcatgatgatgcatttctgtcagccatacttgcacatctctttaatgtctgcaatgtcattaagcagtggtgtatcatttttttttaatgcagaaactaaactgatactcaaaacctatgacaatttgaatccttcctgcctatccaaccttagtttttctgctcgataatataaattctccctttcagtcaggtagatagtcttcctgtcttcctgtcattcttggtttctctttgttgctcttgtcttccccacctgctgaaatgcttttcttctttctttcttttttttttttctgagaaaagacctcactctgttgcccatcctggagtgcagtggcataatgacaactcaatgcagtctcaagctcctgggtcaagtgatcatccttcctcagcctactgagtagctgggactacaggcatgtgccaccacatctggctaatttcttcatttttttgtagagactgggtcttgctatgctgcccaagctggtcttgaactcctgggctcaagtgatcttcccacttcagcctccaaaagtgcagggattacagacatgagccacccatgtacctggtttctctcttcttttctaactaatcaagtactttaagtcacaactcagggtgacaacctccacctccattgacttctccagagcatttcatttcctcttatcctttctctgcactttgttagaacttacattctgatttgtactgttgacctttgagcccttaagtttatgcaccttctctctctctctctctcgctcactctctctctctctgtctctgtgtctctctctgtttctgtctctctctttttctctgtcaattattttattctggtatttggtacttatgagaaatcttattagtatcctaaactctctcaaaacaggaaatgtgtattttccttctcatctaattcttaggaaacttcatataggaataaaaaatatgtagtagtggattgtctggtaaatgaataaaagagggatttgaggtcagtgggctgtttcaggacatgaccaaggaatgtggtaccagggcagcaacaagcttgctaaggggcgataaagtagtcattgtatataacagaggaatttgggctcaatgcagatttgccactaactctttggcagtatagaattcactagagaaatattagtaggttagttagtattcctaataaagaactgctaataccttatagagacataagccatgtttctcgtctttcgtttctgaaatgaaattttggccagggaaacattttgcatccctttttgatgtctacaaatgtggcatttgtcagatgtgagatagttaagtgtgtgtgtgtgtgtgtgtgtgtgtatatatatactttatatatgtatatatacatatcctatgtgtgtgggtatatatatatatatatatatatatatatatatatatgaatgatgcatggagagatatctcttcccwtgcatccaaaatattcacaacttttcactaatatctgaataacatttgaaaaattgacaactcttctggctaaagatcagcatacacattcgttccacagagacttgtgccaaaatcttgctcagctcaaggggtactgcacaataaacaataagaaacttttataactccgactaatagaactcattgcttttccagtttgaagataaaggatgtctgcttgctttccatgcctaattttcctgatgctgtaaagctgttcaggaaagttcccactgcaggagttttgctagtaatcttcagctccgtgggaagcctttggactctgttgctatccctgaaagtggctgttcttctccatcagtttcctgggcaagggctcgaaccagctattagtgtctatttgcactgcatgaaaacaaaatttaatgtaaagacgcttatagcttgcctaccctaaaaccccaggagtctcattctgcctgaccctggacattttttgaactgatagagggatgggtatctggtgggtctcttcagtcagctcatctcagcatgttgaaagtccaaatgacccttgcctgaggatggtgaaagtaatttgtatgtgtgtatacataatcctgctttttcactatttccagtcacagattgcagagatagttgactgtgcttgttagtgtgagtgttaataactttgctatgctgatttttagacttcctatgctatatgatctccctgaagagcatgacagagcattgctttggaaaatcaatattcggcgtgattattccttctttcatgtgtaatcaaactttgaagaccaccaataggccaaatctacaagcattaggtttctaaacatattgtttagtcaggagaaattgtgttttctagctgaggtatgccagctactggtatggagaaaatctgcctagcaaattggaaggggccagaagctcaaatgctattgagaaccactcaacaattcttttttcttatacacaggattgaagcacagagcaaaaggaaaatccagctttgggatttgttcccttgaacttacaaatgattcattagaccaatgacattgtgagaatttggtctctgacaaagaaataaatgttttaaaaatagtgctaatacataggtacaaatacagaattatgtcaggcatgtatttttttaaagatagagtccagtgaaaagaatacgtgttagaatatggattaggtttctaaaggtatacttatgtctgccttcgtcttcagaaaacaaagttgtatgtacactttaagaaaggtcttagtgtggtaaacgtgagggcaaaccaaagtcctgttacttcttttgtcatatcattaaagcctccagacggaggtttcttcccattatgtgatgtgcagaatttcagatgtcagtcagcagctgaagtcaactgttggtccaccaggcctctaagctgcagcctctgtcagcttggggacagtgggatccatgtgacttgcctgctactgcccttgattgggcagatcacagagcagatggcctgtgtctagagtacaaggtgttaaggctttttttttggggggggaagaaataattcacatgtgctaatattcctggatgtttcactgataatataatatagaatgtatgaaaaaatcaaagtcaattagaaccagaaatctcctgatactggatgattctatacataaatatcttgcactaacagcaagaataataaaagttgtacaaaaaatgtctgttcttccccagaccatgagctccatggaggcagagaccttatttggttggtttactgcccttccccaatgtttctaccaagctgaacatgtatccagctctcagtgccccattgagttgaaataaattacagtgacataaactatgttcttcatcaaatgctggacaagcacgtttctcaggcaacttctctgggatcaacataagaacagggtgatgaaatgtgagaagcagtgagggcaaggacttgagcctggtgcctacctaaagtttacactccacaagtattccacccaacacttcagataccttctcttctttcaaagtcaacagtttatgcccattgaaaataaatacacacacccactcatgcccataggcatgtgtgtgctaccagaaaatatgtacatgttaggctctttggaagcagtggtagtttggtgagaattgctgcattggctcatcaacacagacctgatcgcactttgatttcatatcttgctatgcagggctcccattatctgcctgccatttgtgtgcatttatgtttagcgtcaatttctcctcccatgaggctataatctgccttgtaaggagctaaaatgggaaaagcagttagaatgatgagtccagttggagcctgctggggaacaagacagtcatcacaggccaatcggcagtggagacagggtggccctttatcacacagaggcatctggagactgagagagacaaagcaacacagctgcaagccgaccatgatctgctggaagcttcttcagtcataaagcaaaggacagtaattctgaatgacaatgtaggaaaacaaaaaagaagaagaaagaaagaaaatggttgagcccagacgatcatttttagttacggatgtcacaaatggtgattgctggtagtgaagtatctgaatctgaagaccagctgtatatagtatgtgtgtttatggaggtgtgtgtgtgtgtgtgtatgtgttggagaagacctgcatgcctagttgtagcactagccagaaattcttgtttcatcgtctagaatgtggccagaggtttgcctaaattctcataagtccattactgttcttctataaatcaggctgcctgttttgcataattcaccaggtaattcacctatcactaggcaaggcagctgccatggagtgcatgcaggaattcccttcattgactcaggctggtaccattctcagcatttttgctgtttatatatttttattttggtctcggttttcctttatctaaaaacgtcaagctgggatggatccttggagatgctcgcttaaacaagttcattacacttaaaatagttttacaagcacaagtgaaaataatgtaataattgcagcagattcttagacctccactggatcctgggttgcctgtttcctttactcagttctagtttctaagtttattgctgggttttgatgtatgtatgtgtgtgttaattttttaatatagaatatgaagtttgagggaaaactattgcccttattcttgtcgatttgttattcgatcttttcttttcctctttgttggtatgtgaggagttgcagagcaaagctgctgagatcttatatttgactgaggtttcacaagctctgcgagatatcctaatcttcagagtgacacctggtttagccaaccacgtggaaaaaactaagggtttagatataaccacattcaaccacagcctttaccttctcccctgtgctttgctgtatctaatgacggcccagaaaggtgcaaagagagacttttcagaaaaagcataaaaacaatcaagaaggaaaaaattgcttggttgttttctgagatacctgaaccagaagcaattgagtatttaggtgtaactttctatgacctattagaatgaatgccattcttatggcttaaatttttttcaagatgaagagggcacttatatagacaaagaatatatttcccataaagatatattagcacaattctaattaatcttaaatctaagtttttgttccccaagtccaatactcagtctagaacatatgcccttttctgtgatgcctgctggccaccatgtatgatcatggtatattgtgcattgtacaaagtgcccagccaagggctgaaatcaactagtgctctacttatgaggaattaatccaggcatggcgctgtgtctaccccagaggatgtgccttttctaattttcgtaaagttactgcaatgggccagccctgaagatatacagataacagaatcctatgacttttagatgacattagccatcatgagagcctgcctctctgtaaatggtgttagggtgtttattatcagcagcattgggaatacagttgttttgatgtgttttctgatgccctgttctaaaattcactacttctctgcaggctttggaaagtgggagtgtaaccactggtcctttgggttctttgtgaagttgtgctaaccataagatgccgcatactctcctagtgaccacagtttttatgggaggtgatgtacagcagcaaaagtctaatgtaaatctcatgttggttcttccagagcaggggcagctagagtctaataatttcttgggaagagtttctgtacctggaaattttagatgtatatcaaggacatgtgagcaaatgggaaatctaattgcccagtgcctctggagcaaagtgtagagacagaaccagaatgttttttaccggcacatttctgtattaaactaagggagggaagctctttaactatatgggaactttttctcattggttcctttaagtgtcttaaaaaaactgatgtcttcctaagagaacttgtgaaaggtggtaaaatgtttaattggaacttaagaataacttcctactgaatagctttgttgatttcactttcctgtggggaaaagatagacattgacaaaactgtttcgatgagaattaatcatagctgtagatttcaaggtatgttatgatactaggtttcatctcctggatcttcctcctctacattaaaatgattagaatgataaactcaaggcatattaatgatccctaatcaatgtaaaaaaattatcatttctcttctttatgctgtatttactgtcagaaatacagacatacatattaggaagatttttcttgaagggaattggcacaaaagggttgagacctttaattaatcaaaaaattgaccattccttgaaccttgattgtttggtatcattaacaaaggacatgagacaacatgttcaagctttataatttgctggaaataatattttctttttttttaaaaaaagcaattttttgttgtaattgttaatcttactatatatttgtctcctgaaaatggtgttatttgccactccttctacgtattaattggtgtaagctcttaagttatataggatagttttaatttctccaaaaagctgcctaaggaaagtaaaacaccataaagaaaagggtatgtacccaagaagtagcaagaaactaaagagaagagattgagatattatcatgagaatttaataagagaattaaatatctagaaaaatgtgtacatacttagaagtagtaaacattaatttcctttcttccatctatagttcacctctagatcactcttttctttctttagatcatcagtatccaagattggaaagagtaaatgagtgttgataaatgggcactctcttgttctgttgatataagcttaagttggggtagcttttctggaggactgcttgacaatatacgtcaaatttatattgtgatgtcctttggccatgcaatttacccttcctggaatgtacgctaagtagataattgaataagtgaaaaaccaaatgtcttcataaggatattcaccatagttttgttgaaaattatttacaaattggaaacaatctaaataaatgtcaatacaggaatagtttaattgcatatagaactgtacatacaatgtaatcctatgcagtcactaaaaatgaaaatgtataggtgtattgattgccctgggcaattaccataacgtataaatgaatgagtaaaagtatcacagaataatactcttccctcctaagtaaatcctcaccaataaatcctattatacaaggcaaaacctgtatattatccctatcccctaattttcatcatctctcatatctaatccaccatgatgtctttttcattcctaagtgtgtttcagatcatccacttccctctaactctatcactgtcttctggtccaagcttggtattcaattaatacttgttaaatggattctgaatatgattccattcataacagcacacctatccacgtacgtatgtgaagacacaggtgcctagagaggtgttcactgaactactaatggtggtttcctcttctgtggtagaattcagcattatctttatttttttatttgaatttctcttgttgtttgaaatatttttaaataataatgtgtaatttacccctctccaaaaataaaacttataaaatggggatgataactattattctacctttctcactggataaacatagtggtcaaataaacaaatactcgtgaaagtcttttataatgtgaaaacaaaggtttttttgttattatgtgcaataataataataataactatagatactaaaatttgttgaatatatttcctcagtattttgagtgtcttaactcatttaaatctcacaataagcctatgatactataaatatacccatttcaaatatgaggaaactgaagcagagacagacgaaataatttatccaggtagacacagccagtagagctgaggcaggatttgaccccacacaatcaggccctaggacccaagccctaaccactgtgccaaaatcataatacctgcaggaagtggcaaatgttgaacttagctccatatatcagactcttgccactgtgaagcccttacagataatttcttttcttttttgagacggagtctagctctgttgctcaggctggagtgcagtggcgcgatctcggctcactgcaagctctgcctcccagtttcacaccatactcctgcctcagcctccctagtagctgggactacagccgcccaccaccacgcccggctaattttttatactacctcagttaatttagaaagattttcaggcactgatgaatgattttgggagtaatcccaagccaaatgacctctgttggaagtaatttaatagatgtgtttaaatattagaggtgggtgagatggtgaagaattaacatttgaggaacatttggtatcctctgggcaatatgtagacaccctttcaataaatcctcacaacaccccagtaagttatgtgttatttgtttctattgtaagttgcagtcatagataaggaaactcagatatgtattaagtcatttgctcaggtctttacagctattaagttgcagagttgggagcccatctaaactcctaagatcagggtctggatcacctctattattttacattgggcatctatcatccaggacctatgtgctgcaggaacgtaattaagaatgactttgacaagataaatatttggggacatgaagcctgatcacagagtctaccagttatgtggacttgggcaagcaacaccatgaacctcacttttttcattctcaaagtgggactaatgaaatttttcctgcttctccaaaagataattttagtcactctgttggtgagttttgcaaaaacattgtagtataagccttcacaaggaattacagagaagaagataagtcttagcattcaagaagcctggactgtacctgtctcaaaattattttatgctaaatgcagacaattttctctatttggagtttctttcccatcttagttggcctcttctcagttttctgaatgaagcgtgcaccctcggatgtctggcctttactcctgcatgtcttccggtctggaataccttcccctccctcaggaacttaaccagcttcaacatgcagccttcctgaacactccaacatgaagggatgcccttctgttctaaatgtccactgcactgaacaaatcatttaatacaaatttctctgtagtttatacagaggatttgtgtttatgggcttatatgttttctttaaaaataagttataaagtttttgatgctagagcattcttttgtatccccaggagacactcagaatatatttgttgattgttttgattttaaagaaaaaggcggaagaatgaggtaaaatggccactatctgtcaggaacttcatataattatctctgcccagaaataaattaaaatagttttcttcagccagttgcaatagcttatagaaaaaaattaccttccctagatgtcagtgtcccaatttggaaaacagagtttggtcatatattttgtccgctgttgtacaacctttagaaacataaaattcaagaggaatactaaataaaaggatcaatcaatactgagttcagctttaaaattatttcatctaataatgctggttttcttggcagcactagcaagggctagaattttttaaaaatcatccttatatatgtattgattgaatttattaaaatgctttattaccatatccatttgcttataagaaggcaccctgatgtgtcctatatgagtttcaaaacacaattaaataaaaccatgcagagcaacaaacactacgtagcatttacaaactgcatttgtattcatttttatgtacatgaagggaaaaaaaacccaaaaggttgaaagccttctggagtgataaatgccacaatttagtggaaaatacacattgtaatttgagaacatctcccactaagagtcagtgtagctacagggacaagaagcctggtgctaaattgtctgaacattgatgtcccttcaaaattcatatgttggatcctagtacccagtgtgatataatcaagagataaggtctttggggaactgattaagtcatgaggggttctccatatgcatgaatgggttcatgctcttataaaagaggttgaagagagcaccctagggcctcttgcccttctgcttctgccatgtgagggcgtagcaagaggcactctttatgaagcagagtgagcccttgccagacactgaatgtgctggcgccttaatcttggacgttccagcctccagactgtgataattaaatttattttatttctaaatgactcagtctaagaagttttgttatagcagcccaaacagactaagacccctggcccacaggctcctgagcatctcagtgcctttgaggctataaaggacctcgaccttcactttcagcacatgttcaagtaaaagagaaaaatgtgtgtaaagaagtgcccatacccaataaacatacccatatttattgcaaattatcctctaaactgtttcattgtggtcaaaacccaagttataaatttttagtgtccttttaagagttcagtatttgtcaacctacggtcaacatttgcatcaacaaagaaggtaagatatgttgtgttatctttgtcatttttcagctgtcaactaggataggggccagaaatagcaaaactgtaaacttgaaattgtttcaggaagaagtgtaatagctaaggggtgtctatgaaatggaatgtatatcaatatgaggtaagacagctggtaaaaaataaaaaattagcaggaggggcaccggattcatgtaccagggaaaataatgtcatgttcattgcccagagagattcccaggaattagagattgagaaatattatttcttgacatgtctagaggctacgtggatagaagttctggaaaatgtttgagataaaggccaataaaaagcaaaaggacctgaggattctgtttattcactgaacagagaagctaaaaattgggctctcattttggacaaaaataaaagccatagtaataagtaaaataaaataacctaccaggtagcagagctcttagcaaaggattctgcaagcaaaaggcaggtgtgaattgggaaagtgagtctgggattgaggtgaggtggggttaggtgtagaacagggctatgaaggtcagggcagtggaaggtttgattctggaaagcatggcttcaagggaaaacttgagtggtgaacgggaaaatctgtgaggatcggaaatgtaagtctctatacttgctggggaaatgagcaagaaatgaaagggagagagccagatgacgcagctggaagcagaaatctgagcagggggaacctggcaacagagaggaggagctggaagaacaggggcagatcagatctagagccaagctgtattctctggccccatactttaatattctacctatgaggcgcagtgcctttgggtgttgttcataaaattccagtgttgaaaagggtttcagacattgtccgtgaagctcctctatccatcaagccctttgcaatatttacagtaaggaaagtgggagcgcttcagaaagagagagagagaaaaatgaaaattcctagccccatctagacatgccttatcagtgagttaggcgaagtgcacaaaatttaaaagtaagattctagttgtttgtattttagctattcacgttgcatcacaagagctccacaactggatttaaataattgtttctgccttagcaatcttaagtgtgcatgtattgttcagctattcctttaggggaaagattgctagatgggaataaaatggaaatgctgttttctaaaagttgtggtcttcatagggagatagctcttcacttcgtgtgttagtgatgaacatttgcaagctgtagagctgtagagaacactttgtggttcttctatttgaagaaaccctgatggctttgtcacatattccaagtttaacttttatttttaaagagtttatacatcatatttgaaaaagactcaaacatgtctagagttatatgttagacactaaacatacttgaaaaagatttaaaaccttggttttagtcatctgtaagtactctattttaaggacaactaattaatacttataactcagataattcaggagacgatcaatgattatgaaataacttcctatgacatacttttaaatagtaaatgccttcactgcatgtaattcacacatcaatatatactaaactatttccattaatatagccagtctccaatttacaggaagacattatgtttcacaagttgattttaagtgaattttttgtaatatagaaagaattgtcccaaagagtgactgctgaactggttaaatccacaaaaaaaagcatcacatgaattcatctactaggcaaatttgctcatccactttcaagtcaaaaaaaagttttaaattagataaaaacctgtgtatcccctttcttagtaaatttgcctgctgtgataaatatacacgtgcacacaaaaataggcatgcatttttaagaggagtagaaacccatttgaacttgtccaggaactcaagtttagaggctcaaatgtagagaatactaataaccacctataataattcttttggagaaggcatactgtattatgcctagtgcttaataggacaggggatttttcatctctcatgtgcctgggaatgagagccaggggcttcccccaattctaaaaaaattagcaattcagcagaatctacagtggggccaaattgtggctgggatttgggggatttcatcaaagtgggtcagaggtagaggtggaagagaagcagaaggccggtgggagtaggatacagtacaggggcgagcttccagctggctccatcagttgaggaagaagaagcaatcccaggaggtccatactcttgatattttatccctcctctcactaaggacagctatgccctttgtgatctgccctagactgactttttaatacagagaatgaaggccagtacagaaagcaaggagagaaagaagagaaatagatgctaagttgtccccttgaggaagaatgagggaaaatggagttcctgccaccctagtctattagctgacattgttactcctaattcaaggtaattattggtatgcaaagaaagtatgtattaactatatgtcaaccagtaactccctgaaatccacttgatgatagaaaattagtctatggccatatcactgtgaatgcaccaaatctcatctgatagcaaaatattgcatacatttcttctagaaactaagaattccaatgaaaagctatgaaagaatcctacttaggtctgaatttccatacattcctggtatctcagagggtggcaaggttagaaaacttgagaatctgtgggcacactagggatgaagtgatagtattctttgttggatatcaaaagaaatctaagcaggagaaccaaaatccattggtggaaccaaaaaaccattggtggtctgaaaagttaggtgggagaattgaatagcttagttctagggatcaagtaaccaccctgactattgagcttcccgataagacaacatgatggaaactacatggtttcatccaggtgctgggaacaagtcctactgaacattggcttttggacaaataacaggcagattctttggtgaagctttgttcatctgaaactcttccctgtcctctcttctccacttcatttttctgatgaggagaatggaagtttgtataaactagagtgctcaagcagcaggcagtggaagaggcaagacctccaagtagatctgcaagctctgaaccaagtgacctatctctargccatawtgaggaaggccaatgcarktttgcgatctctctacctcttcatttttccttttcctcctccccttccccttttgctctccccctcttcctctcaagagagtaatgtgctagtagtacctgatggtaccccagtgcttcctgccttcctcccttccacttcctgccttcctttctcccacttcctgccttcctcccttccacttcctgccttccccagtcccacttcctctcttccttcctggcaccccccagcactcccttccctccttctgttctccagtaccttcctttcttttcctttgcccttctctcttcctccttctctctttattttccttccttccttcctctgcaaggccttcttactagtttccacccattttcctatgtaaagcgattttgaattctagccatctgttaatacaaggcagtgaaaaatgttgaagtcacatcaaattccacttgctctgccagttaaaaatacagatgcttcctgttttatgctttcctctcactttctctagagtttaaacatgaaaatatgttccatgataaaaaccagcacatattccctttcatcaggaaacatattccaaacaatgaaaggaaggggagggggattattttcacaagtccagcaaggatacttggatgttgggggaatcatttgtagaaccataatttcacagagcaagaacataattattcacaactatcacattttatagatgaagaaactgagatcgcagggaattgttataattgttctcatatgtgctgcatatcgacttgccaaaattcacatcagcttaaattttcacccaacatgcctggtcctcaattgttccacaatactttttgctatccgctgatttcagaaagggttcttttggctactgggagaggccaaatcactaagcaatggataattaacctgaaactcagtaaatgcactggagtgaaaaaaaaatgtgagactaagagtcaagacacctgggttctagtcacaaatctgttactaactacccatcccaactcatagcaaaaatttttattaatactcttgctccacaaagagactagatcaaatggtctctaaatttactttcaactctttgaatcttgagttttcttccttcaattttctgctgactcagagcgtatagccttggccaagttatttactgccataaatctcattttttttccaagatgaaagggagaataacacattcccctattttcccagcatatatatatatacactatataatcttgcattaaattgactatctttagaaatcacattaaatcctttctatctatagactttggattagtcactaaagctagaataagacatgggccatatcattaggcaatgtctctggctgtagttgtattatcaaacactgcattgacgcttgttcatccttgcttccatcatacctttttatgtaagctgttctaattcttacatgactataacatggagcactgtatgtcaccatatctcttcctctcattgaatctgatcgtattctaatatctcctatctcaatgcctagttcttcacccattttaccaatgcaatatagaaactttcttactgcctttttatttcttacttttcttttgaataattcaccaagttattattgattttgtctgcctgatgtctttcaaatttatccacttttctctcttccatgatatcctaatctaagctaccatcacccctcaactgaactacagcagtcaaaagggttatttccacacagcagtcaaaaggattgtttcaggtgctaaatttggcaatgtcaccccactgaatggctttcttctggtcttaaagacccgattccagaacaaaacttacatggtaggcagctcctggcccttgactgtgtttctagtgtcatagtacatgctcctgaccttttgccctctttgagttcctcctcctcactatcctttcctggagattcaggtttggcagttccccggggttagaatgctcctccatgatttacctagttgctgcttattcttctggttttgtactgatggtcatgttctcagagcagccttctcagcctccctgggtcagttccctccatcatgcaccatcattgtgccttgtatccttgctgttattatacttatcagagtcgtaattttacatttgctcatgtcatactttttagattatgctttgctttcttctccttcaccagagtgtaaactctatgatactatgtctatttttatgtcaccattgtaattccagtgcctggcataatatctaatgcatagaaggtgcaggctaaaattctattgaataaataatgaatgaaaagaaagaatagaagtgcctgagttcaggccctgtatccccattccctcatatatgtggttggaaccatagaaggcaaaatttggtgttaaaagaataaagctggcaagcactgatgtgcctaacaggataggaagttcagaattcttttttaaaagtgttcaagggcccaggagtgcctggctaacataatgagacccagtctctacaaacatttaaaaattacacaggcatggtggcatgggcctgtattctccgctactctggaggctgaggtgagaggactgcatgagcctaggaggctgaaggcttcagtgagctgtgatcacaccactgtagtccagcctggtcaacagagtgagaccctatctcttaaaaaaagttctaggatattggagttgataatgtttgtaaagatcaacgctaacattgcctccaaccaagtctcaatatgctccaaaaagaaatacttcaaattaaaactcgtgtgtgtgtgtgtgtgtgtgtgtgtgtgtgtgtgtgtgtgtaaggagaggtggctcatacctgtaatcccagcactttgggaagccaaggcgggcggatcacttgaagtcaggagttcaagaccagctggccaacatggtgaagctccgtctctactaaaaatacaaaaattagcgtgctggcatgcacctgtagtcccagctactcgggaggctgaggcatgagaatcacttgaacctgggaggcagaggttgcagtgagctgagatggtgccaccgcacttcagaaacagagtgagactctgtctcaaaaaaaaaaaaaaaaaaaaaggccgggcatggcggctcacgcctgtaatcgcagtattttgggaggccgaggcgggcggatcacaatgtcaggagtcccagaccagcctggccaacatggtgaaaccctgtctctactaaaaatacaaaattagccgggcgtggtggtacatgcctgtaatcgcagctactcggtaggctgaggcaggagaatcgcttgaacctggaaggtggaggttgcagtaagcagagattgtgccattgcataatggagtgaaactccatctcaaaatatatatatttttatatatttttaaatatatgtttataaatatataaatatttttatatacatatctatatatagagagaataaatatgtatccacagagagagggagagagataccaagacaaacttataattgctataaattcaaataagagagaagtcagtaaaacctagagtaactaggaaatactccctagaggccaaatttgacctgtgctttgaaaggtaattacaattgggacaggaaacggcacggcttctttctcaaagattgattattctgactattctccattagctcttccttatacactttccactttcccaaactctgtcccgggatgctgacatgaaccacgtcaacaggactccctcacatcctgtcttcaagtagcatttgcccagagagaggcctcaggcaggaggttgtaggatggaaggagagatttgcaggcattcatttccctgctccctccctgcctggctgcagtgggtagtagctaattcctcttctgaaggccacagctcctggtggatgcccccttctcacttacaactgagcttctcagtgggttaccccttcacaactagggttggtcatggctttctgatgctgtgatcacccagggtacttttaaactctctacttatccgtctggggtgccatgtgttatttgctaagaatgaggtaataggaattttttaaaaaaagattaaaataatactatcagcctgtcaatggggattcctcccacccccaaaaatagagttgttcgtttctctttgtttggtttacatgatatatatatatatatatatatatcatgtatatgtatatgatttacctcaaaacagatcacaaagctgaggtcacttgaaactgactattacaagctagctggtagaattaaacttgtttccctaagtaaaatagaaaaatttggccaagagataagaaaatagctgcccctcaccaccacaaacacatacatacacactatactgaatggatcttcatagagagtaagttaataagaggccagcccctacctctgcttccctccccagggacatacatataaatagttcagttatgtctgacttaatagatttgggaaggaggaaacgtgagaggctagtccttctgaagggttgggaggtaagggtgagggaagggaggggagcaaaattacggtactgggatttggacccagataaaagctgctttgtcacatcatcccgatgtaaaatccgtgcatctgagagatagcccctgagccaccacacaggctcctcccaccagagtctgtctggcaggggtcagtgctgcctcgctgtggattagagggagtcatcgacatgtcatctgccatcaaccacacttattgtgaggaaaagaatgccccatacacatagaggccacccttgggatggacttttgagttgactaaagagtaaaaatcacaatggatcatccactagtcagcattattacctttactaacaaaaccagtagcttagccacgatcgtataaaacaataaatgttggttaatttctaaagtacattgattgttttagtttttgttttaagaaaaaggcttggccgggcgcggtggctcacgcctgtaatcccagcactttgggaggccgaggcgggtggatcatgaggtcaggagatcgagaccatcctggctaacaaggtgaaaccccgtctctactaaaaatacaaaaaattagccgggcgcggtggcgggcgcctgtagtcccagctactctggaggctgaggcaggagaatggcgtgaacccaggaagcggtgcttgcagtgagccgagattgcgccactgcagtccgcagtccggcctgggcgacagagcgagactccgtctcaaaaaaaaaaaaaaaaaagaaaaaggctttatgtggctgttgggaataggattatttcctctaacatttatcccagtatttttaaaataaagaaacatttggtcgatgaaaagtatagaatatttgtggtaattataataagtgaatacattacataatgtcctttgtgaaaaaggcttacattattataatgggaaggaggtaaattaatctgagtagtattagtataatagtcttagtaattataatggaatgaatcaccctatattataattatgattcaaataatatatatttttagagatcaaccgtttcatgatgtgctggaatgggatgtggtaataggagagcagtgattttggctaacacattaggtattctgagtcaatttggcacaacagcagaaattattttctctattgtcttattgagaagaaacgtcctaagaaggatcttggggaaaataaataagtatgtgagtctgacataggaagagagggtttcttcccctgcaaggcaccttgtgaaagcctagtggggagaaatagtgggatgatgaaggatggggcaggttacttctggaagcaaaattcagatcccgagtgcaggtgttgttcaggcctctgtgccccactgtaagtgtgctggcttcattgaaagggatgagaataaggcagacacgttcaaatatgcagagtgagggaaaatacaaagagcatatttgatattggttgaatgattgagaatatttgatatttgatattgattgataattgatgagcacttactgtgtgactaggaactgaactaaatgctgccccagagatcattcttatttatgctcacaccactcatgaagcaaaccattgttgttattttcattcttcagatgaggaaactgacagtcagtgatgctaagaaacttgctcaaggtcactacagtagttattgtgggcctggggtttgaattcagcctaactccagagtctatgaccttaaccattaagtgaaataagtgaacatcttcatgttcaggacatgtgatgtgtgtgcacacgcatgtgtgtgtgtacaaaataaaatatttgaagccaacaggatcctaagtctgggtgggtcctaatgccagagtgcttagggacacttcctttttaagcaagatagtttgacattgtcagcttttaattgtaatttaatttcttgtgtgaacattattaaaatgtattaaaaccagatcaaaacatccaagacttttatccccctgatttttatagaagccctctgcttacaagcacttaaagagagatgaatccttatttttcctctggtaagtgatttctaaattcccgtagaaaagcctttaaaaagaaaactcaactagctgcatttatggacttgaatacctacactctactaaaattattgccttttcttaatgatgttcctgactcatcctgaaaattgatcatatatgtataaggtgatgctcactttacaggtggagaatgttgtagccacaagtaatgaagactaatatatagatatttaaatccacattttgtccagaattctcaagcagggagttctaacctagccccacccctcattccctcattaagcattgttttcttagaaaggattaaaactggtaatatatctgtaatcaattagctgacatgacttaaaattgataagtcatttgatgaattctcatctcaaattccgaatgaataaacaatgagaaatgggaaagcctttggcagagagagactcattgaatcagttaattaaggaaagagaaagagccagagtacaagctatcaatatcacctacatgggtcaagaactcatccttatgtgtgtaataatagagctactcataaacctgaaatgatacaattaattacggaagttatagaatattggagcatcctcgggtgaaaaataattgtgtctatattataaaagtatgcaacataacacattttatctgcatttaacattttgttggtgtttcatgcaaatgaaaaaaaaaaaacactgtttttatgatttagccaaaccatgctaactctagtaacaaccctcccaatctcagtgttttaatgcaacaaacagttgtatcttgttggtataaattccactgcattgttcttggttgggttgttccttaaagaggatactcaggaatccattctcttcctatactgttccagaggaagatggctcctccattttcaatacgtggcttcaaggtcacgctgacgttgttcagacagtgttctgttggaagagtgagagaaaaaagcatgtacatacaattccttccaacacacatacacttaactgctttggtttgaaagtgacataaaccttctgctcacattccattggccagaattcctcacacagtccccacctggcttagtgctcaggaagaggaaatagatttgatgatcatctaggcaatgtctgtgatgagattggttcaaaaaatgtaccagtaaaaataaaaataatcctgttcattacattccagaaaatgaactgattaaagacaaatatgtatgcatcacttttctctttacgtagtgaagcaatgtgaaaaacatattaattgagctattcatggcaagacttctctttataaacttcatacatctgtcactaaattgatatgaaagaaatatttgatctcagaaagaattttatctatcatgatggaatgctggcagccaaatgtatacctaaaaattgctgaaatattggagtaaaaaggaatagttagatcgatcatcttaattttgtgaaagcatgcgtacatttttcaccttggattcagttgtgttggcattttataggcacagttataaatttgcctaaaatacagaatggcattacaacaaaactcagactcatggtgtaatcattgtttttttcaaactaaaaacaaagaatgaaaaataaaaacctctaagaacaaaattactccatttaattaaattaaacagacaaaacttggaggcatagtagagatggcaaggaaaggcctcagaccccttacccccatccaggggaaatatttgccagccactcctatcttcagcaaaacttgagttatgatgtaaactcaagactcttaaatttgtgattaatcctgggtgtcttgaaaattggagagtgggttagcaaattcatagttccccaaatttgtgctatctactgctgttttcttgtggattataagcttgaaggaaatgtgctgcctagagatatgagctgtgtgtaattactcccacctgctgggtaaaatctttattacatgggcattagacttcattcccatcgaggggtgaggaggggtgcaatatgaaccaaccacaccacaaggcttgtgaacatccttcctctatggtgtctcctgacacttctttccagcttccaaatgtgatacaactttgactggaaactgtgaaccaatgtgtatccaatgaaccaagggagatttagctccttaaaagaaaattaaatgtagaaagatgtggaaggatcaatgaatcatatttatccaataagtggttcaacaattacaagagcgagacaggaagggaacccttccaggcagagtggtcctcagctctggttttccagcctagagacccatgtggcaggaacttggccttcatcattgaataccctgcatacacccttcctcaagcctcctttgtatgtgtgagagcactgacttcagaaacagaaatgagtttccagccctcaagggaactgtttgctaaagattggcaggagcccacaagactacgacacagtctttgatgagctggctctccaagtgtgggcagacttttgtttctaagttattgggaggctttctgtgggtataaaacctgcaaaaaacacaagcatcaatgttgccatattaataactgctttcatccttggcaagaagaaaaagaacgtggggaaaagagtcaggcgcaaacatggtttgagttttattgtcttttacttgctcactgcctacacctcccaccagtagctttggaaagagagtttcagaaatgttatcttatgttttttatccctaagaatggggtcatagtcttcaatttatgcctaaagtgtttaactactccttcttaatttactcgctctgcccaggaagaaaacagacataacttgcaaaggtggaaacactggtacgttaggaatatcattcattttcggattcttggcccttgagtttcactgttacttaattgacaaagctgagctgtttcatttcacgctaggaagtctttggttaaattgcaggcttgggtttctgtcctttggcagtggaagtaaagagaaatcagaagcaatgtagcatttatgaaccactggctcctctaactgcctctgtggcttcaaatcctgatgatgtcaattgtggtttgtgtatatgtacgtgtgtgaatgtgtacacacatgtgagtgcgtgaacattcgattcatttctcatttttgttctctctcttttcccctcacctccggaccttttcatccttctttatgttctgttgccttcatctcttagtttttctattctatgccccttttgtttctactcttttcatctgacctattattatgtcatcagctataagcaccatggaaaacactagtttcatcatctccatctgaaagaaaaaaaaaaactcaacaagggagaagctgaatatatctgtcttcagtatctatctttgaatttggaatgcttcctgccaagaaaattatattctgaaactccttagatcttgcagtcttcatgaagcacaccagccaatagctgcctcctgacatcagctcagatatctggttgacttttgctgctagctcttccagccaatgaaagtagataccttaggccagtgttcccagacatttaggttttatgggataataaaatctccaggagcaaaatgaagaggctgatatattgccttctctttaaattttaacacttttgaaaaactgccatctacacactaccgctttttacattttaacacttttttaaaactaccatccattgtcatcattattccataaaaagaggtattttaggaaggatactcacaacataagttggataaatttagcaattaaaaaagcactgctttacttttatcttctcctttaatcaaagatgggatatgaatatcaaccagcattgatccaattttaggcccttagttccaataaaattgttccttttcccatataaatggttatgcctttgggccaattgctctgtctctcagaggttattatatcctgttgcctctatattgaggattgctgtttcatctttggagttacaatgtcccaaagggatcactgatacattcttagctccagtatataaatagaggcactaagaaataaaatgagagggttttgacacctctccctctcccccaccccccaacacacacaaacaagtaaatgggttagcttttatttctacaattgcacagcatatttagtgagagagggaagttggaggtgggtatcacacatgtaagatattgcccttattttttttttttttcagagacagtatctcattctgttgcacaggctgaagtgcagtgcctcgaacatagttcactgcagccttgaactcctgggctcaaacaatcttcctacctcagccttctgagtaactgggactacaggcatatggccaccatgcccagataactttttaaaaacatttttgtagagatagagtctcactatgtttaccaggctggtgtcaaactgctggcctttagtgatcctcccattttgccctcccaaagtgctgggattacaggtatgagccactgcacctgtcctggcccttattattgagtagattgtagtctaatgaaaacatatgagtataataaacaaaagaaaaaagaaaacatatttagccaattcatagcaaaaggcagacagaagtagatgctgaatagagaaacaagactgttagagggcagagaaaggagtaattcattttgctggaagaatcaaggaagcaatcacaaaggtttaatgtgtaattctgaatttatgtgattgctatataatcattctgtttcatggctgcagtgtaagctgtgtgagggcattgtttgtatcagatgtctgaacctctttatctcatcccttatcatagtgtctggtatctagtctataacccataatatctcctgaataactgaatgggtgcctacaatgataagtggtgtgaaagataccaagaaaatcaagtatcattcattgccccgaaagcacctgtgagcacataggtttgcaaacatgccacatgtgttcggtcagcccattgcttgtgtacatgatcatagatggtcatagggatttacttcattctgaaatggaataatttcatcctcaccctgctttaccttaggtaaagattttgatgccatttttattaagacatttacttggaagtaaatgtcatgctgtgaagagccattatagacaaatattgtagccacttgccaagtaatgacttatgctgggaagttgcttaaaaggctgattttattcattttatttgctatacccttgtgctacttagagaagggtagagaatgagagaggagcaatatgttttgttctcttttttttcataaatcagtaattatttgcagagtgttttgtgtaaagtgctcagctcacaactggaaatagaatcctgggttagacagtggccatagtgatatttacatatctccagcttgtagtttgccaattgaaatgcagacatatgcggaaattgcctcattgtcattccttgtttttgtaatattatccttggctctacggattcattttttttctccttctactgtcaacactgttttagcagtgagttatattatccggtgacatcagagaagcaaagctacatgtgtcagcttggcaggaattgtccacttacagcaaatttgtgacaagttgtatttttctaccattttcacctggagtgacgaagaatctacagttgagggagacaacatggacctcccctgatggtaacagtgctatgtccaattgagctgctgttgcttcagtaccaaagaggaaggagctggtgatctttgaataatccttcccctatgaaaagtaggaatgtatccccagagttcattgtctgtatctgtaggtaatggaggcttaactggcattaaaatcatagccagtttcagacccattaagtttaatggtttttgtaatgataggctgcaactgatggaataaccaaaagaacaattcatggactgtttatggaagaataccttcaccattcaaaatggacattaaactatggctggtttcattgcaaggcaaaagttccctctttatcttctagttaggtccatgtgcagcccaggaggtatgtaaaagctatactttaggagaaaagttgacttgaagcttttaagctaatgagtttgaacttggcatgttttctattatcattgtctttaatcagtggtgttatataataaggagctaataaattaatctaagtgtaagtcaaattaatataagttaaagtcaaaatccagctaggcaaagccagataggcatattaaaatggcagcccctaccccaattccttgataatccattaaaagtagaaagttttggttaggaagccacctcctgttacgtaaatcagaatgtaagagccatgagattagggattttcatttgttttatccacttttatatcctcagtgtctagaaaaatgcttagcatattgcaggcactctgcaaatattgaacatacggggttgatgaacatataacccattttggttgatgtagttttatttcttaagaggtaaaaattctttcagaaaaagaaaagtaatcatttctacaaaataaccctccactggttgatattcttcccagatctacctttcttcacacagatctttttttaagagaaaaccacagggatatgtggctggtgcaatcaatgataggtttgggatatgataaaatgtaggaaatggctaaatgggagagtacatgatttataaaatagaatttaaaataacagccctcaacagcagatctttgccagcagcacatgatgggaaaatataaaccccattctggggatggcatctggtacagattgagaaataaattgggcagcgaaacagaatgtgtcttcagtggtccttaagatcaaaccaccaatgataagcatggatcattggagcctccaccttgctctttttgaaacagctaaaatcagcaagggaatgaaaaggaaatggctttatcatctgtgagcagcttgcccctccctctggagatccaaatctccaaacatgcattttgatatactttgggagttctctttatctagtaatttcatttaggggaaaaaaatatagctctccctgcccacatcccacattgttacatcactgattcctcaccatgctaacacattcaataatctgacgtgcaactcaactagaagagcaatcacagccagtgatgggccggcatcatggagagtaaagacaaatggaaacaataataactgtggaagaagcagatctcaaatgggaaactcaatcccagtgatcagggaaaactccaaaggaaggatatgagttcaaaaaaatcaattcaacaaaaacttattgtctgtctaccatgtatcaggcatggggatatattactggtcaacacaatgtgctttgctgcctggtgcctgtgttctgatatctggtgtgcatgttctcaatggtattgcaagttgcattgggctagaatcatgaagtattatcaggggatttacttgaaattaaattagtcccattcttgtggaaatctggagctggcatatgcatggaagtgaaggtcttgttgctggttgaatttagtgccctctgcaatgaaagccaaatcccaactttagtctgtgactggggggccttctacaaagagaatgaattttaacaattaaccaacaatctaaattcttggaaagtgaaagtttctaaaacataaaatccatgaagacagaattagaaaatcaatgtgtcctttttggaggaagaggaaagccgctggctgaccacgtcactttcatgtttctactcaaatcttatcaacaaggcctttgttgaccattcatccccttcctaggcccccttatttctatgtctgtcttgtatcatctgacacattgtaaatgtccttatttatttgcttactgtctgtctcttcactctgaaatataaattccatcatgtcagggactttttcttcatcttccccaaatgatgtttgaagcctcccatctaatgctgagaggtatttccctagtagccctgtcatcactttcctaccactgtccctgttgccacataatttaagattccctgtggccaatgctgatgtcattatcatggacgtccttaggaaacgaaaataatttaagcttctaaaatgggcaaattcgatgtagagttgatgggtacatcacacacccatctagaaaagagcatctcaggttggtacctgaaacttggtagactccaccccaagtcacatggccaactgatgtgttacttcttagacatcctgctttctctgtccataggcctggttgggtggtctttttcagatactaaatcatggtacaattggttttcataaaactagtactctaattctacttttccagtagccttgagtaaaggaatgttgaaaacttgtagtgatgaaacgtgtaggatttgcgatttgtcggagtagggacaaaactatttgagaacatagtccagctgaccaaaagaaaataagttctcatattactaataacttttagggatccaataggctcaagaattctgaggttgggtttgacagtgattagtgtaaattaagtagaagtagttaagaaagtggctgaaattgaaggatcggttgtggttagtaaatatggaggattgaaacacaatgcaaacttgataattgataaccttcatttaattctaactaaaagcccactttctggtccaaagttggaactaagaatgaattctttttactctgagaggatatttacaaagaaaacacaaacacacaaactatgggtaacacaaaagcaaactagaatgatttatcttattattctgttatgggttgaattatttcctcaaaaaatatatgcttgtcttaaccccagtgctgctgaatgtgactttatttggaaatagagtctttggaggggaattagtaaagatgaggttatactcaagtaaagtaggtccttaatccaatacaactggtgttcttattgaaagagaaaagacaacgtaaagacatagacacacaggaagaacaccatgtgaagacaggcagtggtcagaattatgtatctacaagccaaggaatgcctgaggttaccagaagctggaagaggcaaggatcccctccagagcccttagaggaagcagggccctgacaacactgtgatttcagacttctctcctctagaaccattagacaataattttctgttgtttgaagccaccaaatctgtgatactctgttacacaaatcctaggaatttgatacaccttcctagacccaagtggggaagaaaagggagaaacaggtttagaggtggagtaaaagataacagcttctcacaacttgaggcaagatgcgtatgctgatggcagagaaaggagttggcattttctgaaagcctgtcagatcccctgctttgtctgggaaggggaggaatatccacagcgtcttagcaggtgaaatgcagcagcgaagaccaggtgcctgtattgttgcctctggttgtgcagatgaagagtcattaggctgacctcatctatggacccaactggaattagccctgactctagagccactggatgttcaggcaaaactgaccctaaaattctttttaaatgcattgcttaagccaagcattctcttattcaaaatcaagctgctgcattttcatgtagcatgaaatgcaattttctatttaaggtgttcaactaacttagggataggttgatggccaaacaaagaaggtttcattaagatggaaatgatttggagtatctagtctccaaagtgattgctctagagacatttatcaatccaccggtggcttctagtcgatatttggttttataggttggggcaaaagtaattgcagtttttgactttttaattgcaaaaccgcagctacttttacaccaacctgataatattccccagatccttccctgcttcctctcattagtaaccagagcaggctgagaatcacttacctgtctcttgtgttccacaatgcacactttgaccccatctagtctcttccaatatcatttactcttgtccattagcggattttctttacttcctgtgtgtctagcttgttggggggatagggaggagaggagaggctgaggatattttttctgtgtgtgtgtaaaggttattcaaattctttatcacttgcttttgctttttaggaagaaaaaaacatgaatatcttataacactattttttaaatgaaattgttcagcaaattatacttaattatatttttaattttaagttctgggatacatgtgcagaacatgcaggtttgttacattggtatatgtgtgccatggttgtttgctgcacctatcaacccgtcatctaggttttaagacctgcatgagagggtggagccaagatggccgaataggaagagctccagtctagagctcccagcatgagcgacgcagaagacaggtgatttctgcatttccaactgaggtactgggcttatctcactggggaatgttggaaagtgggtgcaggacagtgggtgcagcgcacccagcatgagccaaagcagggagaggcattgcctcacctgggaagtgcaaagcgtcagggaattcccttttctagtcaaagaaaggggtgacagacggcacctggaaaatcgggtcactcccaccctaatactgcacttttccaaaggtcttagcaaacggcacaccaggagattatatcccacgcatggcttggagggttgtatgcccacggagcctccctcattgctagcacagcagtttgagatcaaactgccaggcggcagtgaggctgggggagggacgcccgccattgccaaggcctgagtaggtaaacaaagcggccaggaagctcgaactgggtggagccaaccgcagctcaaggaggcctgtctgcctctgtagactccacctctgggggcagggaatagccaaacaaaaggcagcagaatcctctgcagacttaaatgtccctgtctgacagctttgaagagagtagtggttctcccagcatgcagctggagatctgagaacggacagactgcctcctcaagtgcgtccctgacccctgagtagcctaactgggaggcaccccccagtaggggcagactgacacctcccacagccaggtactcctctgagacaaaacttccagaggagcgatcaggcagtaacatttgctgctcaccagtatctgctgttctgcagcctccgctgctgatacccaggcaaacagggtctggagtgaacctccagcaaactccaacagacctgcagctgtgggtcctgactgttagaaggaaaactaacaaacagaaaggacatccacaccaaaaccccatttatacatcaccatcatcaaagaccaaaggtagataaaagcagaaagatgaggaaaaaacagagcagaaaaactggaaactctaaaaatcagaacgcctctcctcctccaaaggaatgcagctccttaccagcaatggaacaaagctggatggagtatgactttgatgagagaagaaggcttcagacaatcaaactactctgagctaaaggaggaagtttgaacccatggcaaagaagttaaaaaccttgaaaaaaattagatgaatggctaactagaataaccaatgcagagatgtccttaaaggacctgatggagctgaaaaccaaggcacgagaactacgtgatgaatgcacaagcctcagtagctgatttgatcaactggaagaaagggtatcagtgatggaagatgaaatgaatgaaatgaagcaagaagagaagtttagagaaaaaagaataaaaagaaatgaacaaagcctccaagaaatatgggactatgcgaaaagaccaaatctacatctgattggtgtaactgaaagtgatggggagaatggaaccaagttcgaaaacactctgcaggatattatccaggagaacttccacaatctagcaaggcagggaacattcaaattcaggaaatacagagaacgccacaaagatactcctcgagaagagcaactccaagacacataattgtcagattcaccaaagttgaaatgaaggaaaaaatgttaagggcagccagagagaaaggtcaggttacccacaaagggaagcccatcagactaacagctgatcctctcagcagaaactctacaagccagaagagagtgggggccaatattcaacattcttaaagaaaagaattttcaacccagaatttcatatccagccaaactaagcttcataagtgaaggagaaataaaatcctttacagacaagcaaatgctgagagattttgtcaccaccaggcctgccctaaaagagctcctgaaggaagcattaaacatggaaaggaacaaccagtaccagccactgcaaaaacatgccaaattgtaaagaccatcaaagctaggaagaaactgcatccactaacgagcaaaataaccagctaacatcataatgacaggatcaaattcacacataacaatattaaccttaaatgtaaatgggctaaatgctccaattaaaagacacagactggcagattggataaagagtcaagacccatcagtgtgctgtattcaggaaacccatctcacgtgcagagacacacataggctcaaaataaagggatggaggaagatctaccaaacaaatggaaaacaaaaaaaggcagggattacaattctagtctctgataaaacagactttaaaccaacaaagatcaaaagagacaaagaaggccattacataatggtaaagggatcaattcaacaagaagagctaactatcctaaatatatatgcacccaatacaggagcacccagattcataaagcaagtccttagagaccaggaagagacttagactcccacacaataataatgggagactttaacactccactgtcaacattagactgatcaacgagacagaaagttaacaaggatatgcaggcattgaactcagctctgcaccaagcagacctaatagacatctacaggactctccaccccaaatcaacagaatatacattcttctcagcaccacaccacacctattccaaaattgaccacatagttggaagtaaagcactcctcagcaaatgtaaaagaacagaaattataacaaactgtctctcagaccacagtgcaatcaaactagtactcaggattaagaaactcactcaaaaccgctcaactacaaggaaactgaacaacctgctcctgaatgactactgggtacataacaaaatgaaattaagatgttctttgaaaccaacgagaacaaagacacaacataccagaatctctgggacacattcaaagcagtgtgtagagggaaatttatagcactaaatgcccacaagagaaagcaggaaagatctaaaatggacaccctaacatcacaattaaaagaactagaaaagcaagagcaaacacattcaaaagctagcagaaggcaagaaataactaagatcagagcagaactgaaggaaatagagacacaaaaaacccttcaaaaaatcaatgaatccaggagctggttttctgaaaatatcaacaaaattgatagaccactagcaagactaataaagaagaaaagagaagaatcaaatagatgcaataaaaaatgataaagggtatatcaccaccgatcccacagaaatacaaactaccatcagagaatactataaacatctctacacaaataaactagaaaatctagaagaaatggatacattcctcgacacatacaccctcccaagactaaaccaggaagaagttgaatctctgaatagaccaataagaggctctgaaattgaggcaataattaatagcttaccaaccaaaaaaagtccaggaccagatcgattcacagccaaattctaccgaggtacaaggaggagctggtaccattccttctgaaactattccaatcaatagaaaaagaggaaatcctccctaactcattttatgaggccagcaccatcctgataccaaagcctggcagagacataacaaataaagagaattttagaccaatatccctgatgaacatcgatgcaaaaatcctcagtaaaatactagcaaactgaatccagcagcacatcaaaaagctgatccaccatgatcaagtgggcttcatccctgggatgccaggctggttcaacatacgaaaatcaataaatgtaatccagcatataaacagaaccaatgacaaaaaccatattactatctcaatagatgcagaaaaggcctttgacaaaattcaacaactcttcatgctaaaaactatcaataaattaggtattgatgggacatatgtcaaaataataagaactatctatgacaaacccatagccaatatcatactgaatgggcaaaaactggaagcattccctttgaaaactggcacaagacagggatgccctctctcaccactcctattcaacatagtgttggaagttttggccagggctatcaggcagaagaaggaaataaagggtattcaggtagtcaaagatgaagtcaaattgtccctgtttgcagatgacatgattgtatatctagaaaaccccattgtctcagcccaaaatctccttaagctgataggcaacttcagcaaagtctcaggatacaaaatcaatgtacaaaaatcacaagcattcttatccacccataacagacaaacagagagccaaatcatgagtgaactcccattcacaattgcttcaaagagaataaaatacctaggaatccaacttacaagggatgtgaaggacctcttcaaggagaattacaaaccactgctcaatgaaataaaagacgatacaaacaaatggaagaacattccatgcttatgggtagaaagaatcaatattatgaaaatggccatactgccaaaggtaatttatagattcaatgccatccccatcaagctaccaatgactttcttcacagaattggaaaaaactactttaaagttcatatggaaccaaaaaagagcctgcattgccaagtcaatcctaagccaaaagaacaaagctggaggcatcatgctacctgacttcaaactacaaggctacagtaaccaaaacagcatggtactgataccaaaacagagatatagaccaatggaacagaacagaggcctcagaaataatgctgcatatctacaaccatctgatctttgacaaacctgagaaaaacaagaaatggggaaaggattccctatttaataaatggtgctgggaaaactggctagccatatgtagaaagctgaaactggatcccttccttataccttatacaaaaattaattcaaggtgattaaagacttaaatgttagacctgaaaccataaaaaccctagaagaaaatctaggcaataccattcaggacataggcatggacaaggacttcatgtctaaaacaccaaaagcaatggcaacaaaagccaaaattgacaaatgcgatctaattaaaytaaagagsttmtgcacagcmaaagaaactaccatcagagtaaacaggcagcctacagaatgggagaaaatttttgcaatctattcatctgtcaaagggctaatatccagaatmtaacagtgaactcaaacaaatttacaagaaaaaaacaaacaaccccatcaaaaagtgggtgaaggatatgaacagacacttctcaaaagaagacatttatgcaaccaaaagacacatgaaaaaatgctcatcatcactggccatcagagaaatgcaaatcaaaaccacaatgagataccatctcacaccagttagaatggcaatcattaaaaagtcaggaaacaacaggtgctggagaggatgtggagaaataggaacacttttacactgttggtgggactgtaaactagttcaaccactgtggaagtcagtgtggcgattcctcagggatctagaactagaaataccatttgacccagccatcccattactgggtatattcccaaaggattataaatcatgctgctataaagacacatgcacacatatgtttattgtggcactattcacaatagcaaacacttgaaaacaagtgaaatgcccaacaatgatagactggattaagaaaatgtggcacatatacaccatggaatactatgcagccataaaaaatgatgagttcatgtcctttgtaaggacatggatgaagctggaaaccatcattctcagcaaactatcgcaaggacaaagaaccaaacaccacatgttctcactcataggtgggaattgaacaatgagaacacatggacacgggaaggggaacatcacacactggggcctgttgtggggtggtgggaggggggagggatagcattaggaggtatacctaatgttaaatgaggagttaatgggtgcagcacaccgacatggcacatgtatacatatgtaactaacctgcatgttgtgtacatgtaccctaaaacttaaattataataaaaaaattaaaatataaaagacctgcatgcattaggtgtttgtcctaatgctctgcctcccttttccccccatcccttgacaggccctgatgtgtaatgttcccctcgctgtgtccatgtgttctcattgttcaactcccacttatgagtgagaacatgcggtatttagttttctgttcctatgttagtttgctgcggatgattatacttaaatatttttaaacaaggctttagacctaaatccatcaaaataaaccactttgcatgaaaaaaaatcatgggaccatttcagcatgttctataggtgggctgatttaaatgatttccttatacatctctttctgcttgtgctattgaataattgagaagtttgcagggggtgtggtgccttgcacagaccgagaaggaagagaaaggaagcaacacttgcaaaaggactttgttgtgtacagtgatagaatgctctacctgtgttactcattgaatcaggaggattgttgaaggaggagggctctctggaattgtaatctgaagaatgagggttattcatcaggaaaagagggcaaggcaaggggagggggaagcataggagaagaaataaaaggcccagaattctgaaaaactccatgctaaaagacccagaattccgaaaaactccatgtcagcagggtcaaaataaattttgtggaatggttacttagattgagagaaggactaatgagaaatgaaactagaggtagagtcagagatcagttaatagtcttctattttaggttaaggaattcccatttcattctgaaggtcaaggacaacttaggtaaagggcagtgactaagaaagaccaccctggtcaggctcgatggctcacccctgtaatccaagcactttgggaggctgaggcaggcagatcacttgaggttagcagttagagaccagcctgaccaatatggtgaaaccctgtctctactaaaaatacaaaaattarctgggtgtggtggtgcaagcctgtaatcccagctgctctggaggctgaggcaggagaatcacttgaaccctggaggtggaggttgcagtgagccaagattgcatcattgcactgcagcctaggtgatagagtgagactctgtctcaaaaaaatagaaagatcattctggcttttgggtggagaatagactgtccatgggcaaagtcagagtccaggaggccatgccagaagctgctgctgtactttaggcaaattctatgtggtggtggcattggtagtaagagtggagaggaatatacaagttagcgatacatttaggaggtaggttcgataaaacttggtgatttattaagtttgaaagtgaagaagagggaggagtcaggattgacttacacatgaaacatataagacttctttctgtcctaaaaaaaaaaatcaccgttgtagaaaatgatagaaactgatggacataagaaagcaatcaggatctcgattctcaatgccatgtgaagaaccacatgctcttttgacattttaagtagagatgtacatttggtttctgcagatccatttcatagctcggctatgatttcagactcattactcaaaagcaagggtgtaggatcaggggagggtgaacaagttaggcagaggaatgagctgctctgtgaggtggtttgctccacagcctttcactccttcttcccaacgtctcacagtcataaaaaaaaaaaaaaaaaaaaaaaaaagtaggagggagtgcctatatccagtagaattggagacaagttagggacagagctcagagagctgctcctgatgcggaagtggcaagaaaagacgcttcacctccctgacaacaacacatccactgtgtgtagcaatacgtttctgcctaagacaatttacccccagggaaatacaagaagggagacatctcccaggaaattaccatttgtttctactactgaaggattttcgtctatttatttgagaaaagtgagaagcttctttttgctgagaacatagtaaatgctgcaaaagcatttgatgtcatgtccattaagtaacttggctgaatttcttgaagctttaggtaccttgcttcaattcctgcatactatttactgaccctctgtaacaggacttttcaactttcaactatattagaacatgtagtttctctattaccaagttccagctgaacagtctatctttaatattcagaaagtgtttggtgtctactagccaagactgtagtctgagcaatgacattgacagtggaccttgatcttccttcctttgaagcataagtgccttgtatcattttactttcctctagtagaagtccttcctatggttatagtatttagtttctactttttgcatttaatcggagcatctttgtaatttacaatttttaaatctttttttttcaaggactaaacacgaaggtttgaagtccaacaggcaactaaagatgtatacaaaccccgcacaaatcagcctccattctaatgccattcctcttctatacttccattttttaaacctgagcatatattttgttttgagtcttttcttactcttttatttgttaatactctttattcagtttttgtcaggtaaaaatgttttgccttgccaaagaaccatctaattccttctcaggtctttttaatatattgcttccagatatttttggattggtggtttctgcaattctccctaaaacaatcttcgtttctcttacacatctcattctctacgctttggcagacttttgcagatgcattctataactgcacaaattacccttccaattttctccagctaaacaatctaatccagggtcctaaatatttttggtgccatagactcctttggcattccagaggtgcccagggattttactcaggatagtgtctttaaatgcatgtttaaaatacatcagattacaaagaatgtcaattaaattgaaaaatagcttaaatattttaataattgtgatatagtaataaatgaacttctttaggtgcattaagtaacaagatctactaacagggctaataacttattatttcagtatgtctgtggtttctattggtgacaaaaatcacaagtactgttaatatttttgttttattttgtttaaaattatttaaattttaattaataaaacatatatatgtatatttatggtgtacagcacattgctatatgtatacattgtggcatggctgaatcaaagtaattaacatatgcattagctcacatagttattttttgtggtgagactgcttaaaattcactctcctagcaatttttgactgtgtgctgcattgtttttttaactatagttagcattttgtaaatagtcctcttagaattattcccccaattgaagttgtgtgccctttcaccaacatctctgcattttctccttccaccactctctgtcctgagtaaccaccattctattctctgcttctatgagttcaactttcttagattccacatgtaagtgagattatgtggtatttgtcttctgtgcttagcttctttcacttaatgtaatggtgctgttcatattactgtggttttggtgcctacattcaaactcagtggaaattctaatttgcagttagtttttcagaaagaagaaatgtgtgaatagtttcttatggtccaagcccttggatcctctgtattttatccacagatgcttgggaggatctctagatcccagattaagaactccagctagttattagtcctttgtgctttgaaactcaaatcaaatacccatctcttccatagaactttttctaaattcactagactcacttatctacccttcttcctatagtttcattcactctctgttatgaaatatccatttattatcactattagtttttctgtattgctctcttctttgtaaatatctctatactttattctcttttatttcctttgtatccaggacagtgtctggcatatgcaggcacacaataaatacttgtttaataagtgaattaaaactctagacagcttctggtaagtttttccaggttaccagtaatacaaagacctgaatgttatttattcacttctacaaggggcacagtgtccaagtcctgacctttaataagagatgtgcttccagcagtgtcttcttggcatagtcttaaccttttattctgccctggtgcacacttaatctctcatgaagtcacagctattgatttataactgaatcttcaagatattttaatactttataaacatacaaacaacaattaattgcattgttagataaaaatgtattacagagatcaccagcacaaaaataagtatttctatttataactgaaaaaaaaactggcaatggaatattagttgtttacaaggcaagtattctgaataatgtgctgggagattataaataaccttaactaacagtaaaaaaaattgtgcttacagaaaaaaattatttgagttagtctaaatgtattaaacttatcagtaagtagcatgaattaactactattcaagtgtaaaattctacttccatattacctaattcagttccatatgaagtcagccagcaaggatcagctgaggttggctgttgtgaggtttcagccattatgaaaaagaggagctgggcacagcctctgatgaataataacatggcatgggttctgataataagcacagagaatcagaaaggaaaaaacacagagaggagtatggagaactggaacctgtggaaaatgatacacaatttttttttttctacagagtctcgctctgtcacccaggttggaatacagtggtgggatctcggctcaccacaacctctgcctcctgggttcaagcaactctcctgcatcagcctcctgagtagctgggattacaggcatgcgccaccatacccagctaatttttgtatttttagtagagacagagtttcaccatgttggccaggctggtctccaactcctgacctcaggtgatatgcctgcctcagcctcccaaagtgctgggattagaggcataagccactgcacctggccccacaggcttcacagtcagtaggcccaaaggaagtctggtgtggtcgatcaagaatccagctaattctcgcactctcactgtctctctctttctctcaccttccactgacctctcttccctcctattttgtcttgggaaaaggcaggtgattacaaaattcttctaattatgtattttaattaatataaaatctttacaaaacagtgttaataccagcccactatggtttatattttttgctgtgaaaaaaaaatctcctatgctttagcaatactttttaggcagagagtcatcaaaataaaagagtatcagtattgctgaagtaggtcattcctgctttactttaaaaaatttcaaaacgtttcatttttcctccgtaaaatttatttctatcaaggaaatggggagagaaaaattacaatgaaaaactgtgaggataaatgaggtcatatgcctatgaaatatttggaaaagaattataattatcaacttgttcatttttaataccatagttagatttctcattttaaaaggggaaggaaagaactccattacattctagggattctaggcaagataagtttccatcacagttgctggatggtggagctgggctggtatgacattctttccttgtagaacgtgcgttctaactgaagactagccctttattagaaatgcacattgagaagacaggggatttatgagtcacaaaggccaagatttctaaccttgctacatgtggggcgggacttttctatgctcccaaggacttaaggtcaagtcactttcttcctgttcccgtctccttctgtcttcctctcttttttggttctaaccagaaaatgtattccaatttttcttttctttttctgttcaagtcttacagctctgccaaaggcaaaatgctgcagggattagaaagatgaagcagctaagtcaaatcgatagtgacagccagtgaacgcatgtaaatttcaacaagtgaacgttcagcattgtctctggggcctcccaccaatattaacatcactaaattttctgatttaacattctcacaaaacaggaatcaaccaaccaagtgccagccactaatagccttcaggttaataaatttggtcttcattaatctcaaattagagtcctggagtagacttatgtttgggataggagtgcccatcctacaagaagcttattacccataaatcaggtaagagataagaaaacactcctccaggtctcattagccacttcagataggctctgcagctctttaatgttcaggtggcatgtccttagaagatgagctgagaatcaaagctcctgatacaggaagaagcctaactcagcccatctctcttcttggggcattcacaattatttcctttaacccttgtgtagtttcagttgtgttgattcaagtcattattttcttacacaactagggtatatagtttagaatgtgatagaatcttggaaaaatagcaattccccattatgtatacacacaatacacatacacacacacagtactatatatgtatgtgtgtgtgtgtgtatatatagatcacgtaaatatatatgatatatatagatatatagagagagtacatgtacatatatgtgtataatatattcttcactttcattttatttgtctttatgatttcaggcagtggtataagaagatagaaatagcatatgagcacttcacacagtatctgctataaaagtttattttgacactttacttataactccttgaaagtgataaaattttcctattttcctgaaggtacatttagacaaaaatctcagagcctaatattttgaagtgttagttttgctgaggccaaacaaaatcaaggcccagcatataccccgaatacattctcacttaccataaatttattatgaaatggtattgtgttgataggagagtttttgttacagcctataacatttcagggattttgatagacatgatttccaatgggataacatttaaactgagatagctactatttttttttaatatatgtttagttttgtgaaaaaaaaaataaggaaagcatctggtgattgaacaaatatgtagtagagctaaagacattttccttaaaagaaatatacttgttttatgctttaatggttagagctgttccattatagtgtatcatctatactcttctgatttttattacaagtagggatacaacttaaagatttaaaagtccttcccaaagtataagcatgtgtttaattttcagaatggcagtgagacttacttgcacataaagttaagatacctaggttgtgggcttccaaggatacttccttgggaagtctttagaagttgtttttagttaaggacttggtagcatcaagggaagccatgagtggtgaaattctcagagagactcttctttctgtggtcctgccttgtagatgacattctggagacttttgtgtgtaaatgaatgattgaaattccatagtatatttgtcatttttcctaagcctgtttactctggggaaaatcttctttcatccttctaagttcttactccacactcccgtgggtgctcatgcatgtgtgcatgcgtacacacacaaacacacacaaatatgcatgcacacatcttcagtacttgaggcattaacctgcagaaccataacaccgtgaatatagcagtaaaggcaattatttctgtaaacaggtaacagggtgtattaatattactgttagtacctctgaattctttcttccttaataggatgtattaatattaccgttattacctctgaattctttcttccttcccatcatgctagagccatcttgaatatgacttaagaagtgatctttacattttgcctctgtctcaaactaggttctagtggctattaggggctagaccaaagctaaactgagaataaggttacgatagcacaattgttcataggtggtctctcaagacaacagcattgcaaaagaaggaataattgttatgtttattttacctatgggggaaaaacagtagtccgggcagtctaaatgatgtgtccaccatcatagaataatagagagtgaagctgtaagtataattccggttgactttgtatccagtaaaatgttcattcaacttttgttcatctctcctctagtcacactttgtcatgcattgacttcttggcctgatctcaccagtgaaaacccatgggaacagttaataattccatgactaaggctattataatcctatagctacagtttctccagtgaaataatgaaaatttcttcattaatttattataaaagttactgagtttaattgtatgccatcctggatttcttacagaagtgattcttgataatcctaagaaaattcttcttcagacagattttcaaaatgtttttgtctctgcaattactgttctgaggttagatcttatagaagttactccataagaagccaaagcattttcctcaaagtatagtggctaatggctatgctgttaccaaaagctgtgacagaaaacctctggctattaaactcatatctaatgctatttggcctagctattatgtacaatttgagaaactgatttttctcttctaaaatgaaacacaaggccgtgtgcggtggctcacgcctgtaatcccaacactttgggaggctgaggtgggtggtaatgaggtcaggggatcgagaccatcctggctaacacagtgaaaccccatttcactaaaaatacaaaaattagccaggcgtgatggtgggcccctgtagtccctgctactcaggaggctgaggcaggagaatggcgttaacccagctggcggagtttgcagtaagccgagatggcgccactgccctccagcctgggtgacagagcgagactccgtctcaaaaaaaaaaaaaaaagaaaaaagaaagaaaaagaaaaaaaaagaaagaaagaaatgattcgcattgtagggtcatgaatttcaacacatattacagttcagccccttctctgctgctggtggcacactggagatgtggagatgcagattctcaccacacaaagtggggtccgtcctggaagcttgtaagaaaagcagaatctcaggccctacctagaacctactgaattagaatctgtgttttaacaagatctcttggagattcagaggtacagtaaagtttgagaagcacagctggaaactgtctgaagtctgctatgatcatcttaatcttgggagctgacttagcacagtttctgcctctcccagcccagcctctctgccctatttaggctacttctggagagttccacagtcagaaccttagctatttctgtgcctggtctttaccacacacaggtccaaagatgcccaggaaagctaaatcatagacttccccctactgagcatgttgggctgcctgcagtctctccctttatcataggttggccctctttccacattgccatgcagctttgaatgactgaatgttcaaatttttcacagtgttttcattgcttaacaggacatccatggctgtaatttttcagtgaagcatagaatgtgttaattaaagtggcaatggaattgggacaggttgaatattaaatgtcacttctattgtgaataccatcatgctcttaacatttttattttgttttcatgaagacttagtaagggttaaaagtgggcgcattagtgagctggtatttgcctgcccaccaatgctgattttgatttccatggcgtagttctttggggtcagcatgcatggtgtgttaaatgttaccggggacctgaggaataggagagccctttccttatgacacttaatcctgaattatttatctaaataattaagggcaagcatttttaacttcgttaacctatagtttctgaataaaagagttattgagagctctgactcaaggacaaatgacaaaagatgatccctggagtcagggcatcaccctccataagtctcactggaggtttgcttcctgcacaaggagacatgtctgtgatttgtgaagcattcatcttgtttcacaagactttatgctgcacttaggctaaagtcactgccgaataagtcacttcactatcaagaaagaaggggatggcttttctgggggagcagaggcatattaaggtagaggaggggtggcgcaaagcagtccagccaagaaaaaaaaaaaatcttactaacaggcttagaattaccagcacatgttgatagcagaaagcagattggcttttagccagttttattcttgtttttaaatctctaaagacaacgtacccacttagtgcctgcacttggggcaacatgctcccactcccacctcctccttggtatgccagtgcagaggagtttgttcacacatttaagatattacataaaatacatctctgaaggtcgacactctcagggaagagcaagaaatgactggagcatcttagctgcaagataatgtcttattcagatatctttactctaggattatagattttttttttttttgagatgaagtctcactggatttcccaggctggagtgcaatggtgtgctcttggctcactgtaacctccacctcccaggttcaagctattctcctgcctcagcctcctcagccgctgggattacaggcattcaccaccatgtccagttaatttttgtattattagtagagacagggtttcaccatggtggccaggcttgtctcaaactcctgacctcaagtgatccacctgcctcagcctcccaaagagctgggattacaggcgtgaaccactacgcccagctggattatagattttgacactcagattactttggctggtctagtaggcaaataatgacaagacatgctcctgccaaagatgtccatggcctaatctccagaacctgtgagaatatgctacattgcatggcgaaggggaagggagactgcagatggaattaaaatagctaatcagcagataggaagatcatcctggtttatccatgtggacccaatgtattccaaggagtctttaaaagtggaagagggaggcagaagaagagagacagagtaagatgtgactaaggaagaatggttaaagaaatgtcgctggtatcagagacaagaggaggaggccgtgtgcttcctcttcatgtgggctatgcatattctcactcataggtgggacttgaacaatgagaacacatggacacaggaaggggaacatcacactctggggactgttgtggggtggggggaggaggagggatagcattaggagatatacctaatgctaaatgatgagttaatgggtgcagcacaccagcatggcacatgtatacatatgtaactaacctgcacattgtgcatatataccctaaaacttaaagtataataataataaaattaaaaaaaagtcaaggaagtgaattagaggtccctagaacctccaaaaagtaatgcaaccctggatggcatcttgatattagcctggggagacctgtgtcaaacttctatcctgtagaactgtaagataacctgtgtttttcttgtaaaagatttcaacatttgctttagattcagggggttacatgtacaggtttgttacatggcatcacctagatagtgagctagtacccagtaggtagttttcctgcttttgcccccttccgtcttccccctcagtagtccccagtgtctgttgttcccatctttatgttcatgtgtatccaatgtttagctcccacttataagtgagaacgtgtagtatttgattttctgtttctgtgttaatttgcttatcaacctgtgtttttaagcctttatggtaattacttatggagcaatagaaaactagcacaatagataaagtcaaaattggtatggtatgtagaacctaacagagcacggtcctggctccacatctgattagtaatgtgcaattggtaaatttctttagccttattatccttatctgtagaatggacataataatatttaccttatggggttaagagagaatgaaataagaaagcaactataaaatgtctgggataatgcctatcagggtggggctgcccaaagatactaaatttgattttatttctttcctcttatacaatttggtggccctcttagtgagtggccccatatcgttaaggcttactgctaactggcccccctgagtccttagaaatatcaccacatttattgatatttcactgtgttcctctgagaacctcatttggccatatagtcttctaccaatcactggagttttcattagtgctagattggcattagacacatggttatagaaggatctagtagattattattttgtaggagacatcatcagtgctcatgttaaatgaatgatacattctgttgaattataaactgcctctcctacacctttgtctttgtacatttcagtccttcttctctattcaaaactgacgaagtaaatcagttgggaagaatacagtaatttatttgaataaacatttgtcaacattgtttaggaaaataagttacaaattgactgtatcgtcatgttcctgcactaagaaagcattaggagtctgcctaaatccttttatcaaaatgtattattattattattattattattaatttttttctatttactctttcttttttaaaaaattgctctcctctagatattttttctgccactctttataataaaggagacaatatttctaactgcccaacagacttcaagatgatcttgacagcctctgtagccaaattatcatattaatttgatctcagcaacacttctggttcactctgttctgtactcaaatccaaatcctgagctttttcttgagcaaataaaggcaacagctgtgaggtcccagttcatctttccggttttacccatacaacaacaggctgtgcaaagttgtgagcaattcacacatagtgctctcaactctatttttattaagtactctgaagagcaagcaatcttcaaactcctataaaatttcatgaccaaaacagctatcgggatggtgtttcccttgaaatgtctctatgagtacagtcatttattattctaggcttcctgataatccttattagtggataccagaactgtgattttaccgtatttgcaacctaatgagtaagtctaccacatgaatgctggcagaagatacaagattcctgggtcagagatgaaggatagtttattgctacaggatagcagaataccagcatttatgccagtccctaaaatttaagtcccatggggcaaagggaagagggccagacaatgcctgcagatgtaataggggagagttgagtttagggtacccccaaattttataataggcagtactttggtccagataaagacatgttttttatactggatagtagacaaacatccatttgctccagttggagacaatacttctgtcttcccatagatgttcactgtgcaaacaattcttgaaacaattgcctggaacaaagttatcagttattagattttttttttttttgagttggagtctcactctgtcacccaggctaaagtgcagtggcatgatctcagctcactgcaacctctggctcatggattcaagagattcttctgcctcagcctcctgagtagttgggattacaggcacccaccaccatgcctggctagtttttgtatttttagcagggacagggtttcaccatgttggccaggctcgaactcctaacctcaagtgattctcctgccttggcctcccaaagtgctgggattacaggcatgagccaccacacctggcccaaagttattagatcttctgttcacaagatacacagaaatgtgagaggccataacaagttgtcaccctacaatgagtttcttagatgtaaatcgactcttcccttcctatgttggtaagaattgtgccatatgaaacatcatcataggcatatgtaatgttaagcttttttgccgtaagagaaaatttttccttgcttccttagcagaatacaggcttcagttatgtgatcaacctgtttggatctgctaggttaaactataaatgcatttttaaaaatactacagatatttcactggacaggaaatggggatggggaagacagaggagagagtgtatggcctggtaacaaagcattaccctttctgttgcacactgctgcccattttaatgttggccagcagccaggacaaagagccaaggcagctccaaaggatctcagagttggaggcaagagagagtcaaggaagctcccacatgctgaaatgtcaaacctaagcagacctggcctcagagtacaacacaatcagatcttccaccatcagagtcattgatagccacactggctcccttgctgtttctggagcacagcagacatggacccacttcaggtcctttctgctggctctggtctgtcataggtacactccttcacctgatcacccagggatcgctttcttatttccttcaagccttcttcatccaagtactgaccaggcctcacactgcttagcttccgagatcagctgagatcaagcacgttcagggtgataaattagttcaatcactgtggaaagtagtttggtgatttctcaaagaacttaacacagaacaagcattcaacctagcagtctcattactgggtatatatccaaaaaagcacagattgttctaccaaaaagatacatgcactcacatgctcatcatagcactattcactataacaaagacatgaaatccacctagatgcccatcaacagtggataggtatacatatgatacgtatacaccatgtaatactacgcagccatacaaaaggtatgaaatcatgtcctttgcagcaacatgaatgtagttaggggccattgtcctaagtaaatcaatgtaggaagagaaaaccgtatgccacgtgttctcacttttaagtgggcacaaaacattgggtacccatggacgtaaagatgggaacaatagacactggggactactagatgcaggaaggtgggaggggtgaaaaagctaactattgggtaccatgctcggtagttgggtaatgggattatttgtatcccaaacctaagcatcacataacataaccaagtagcaaccctgcacatgtaccaatgaatctagaattaaacttgaaaaaaataagtaagtaaaacataaaacatatagatttttaaaaggcatcttcaaatgtcaccttgtagtgccccaccctgaattgtagtcacctacacacataaactcacacacaaacacacactcccatacacacatcaaaacattcaatacacctaccttactctatttttttttctgacttccaacatagtacatcatttatttaacaagaacgtaagctcaacggggaggaattgttctctgtttattttctgatgtttcctaggtacctagatcagtgcctggtgcatatataaatgaatattttgagtgaatatttgtggaatcatgaatgaatgaactgatgaatgttaatattggtatttttcattgttatttgtcttattcctaggaagacaggactagtcatttgaggtactttttcagaacagccagggctggggaggatcctttatttgtgggtgttaaataatagcaagtgaacacagtgcagcagtagtgaccctgttgatgatgataatgaatcacattgatatagtgcttttctttttctacctttgtgtgtgtgtgtgtgtgtgtgtgtgtaattctcctcagtgtcagggtgatagattatgcccattccttctaggaaaatggttattccatcttaatgcaggcttttagaaatgaaaaataatgcctgctacaatcaacttttaattatctacactaatggagtgctgatgctaaagaaataatccccaagtcatttacatttgactttaggatgcaaccgagggcttgtattcagaaaagcacgttaaaccatcgtcagcagcatgtgattgcagaacaaattctggcctgggagttgggaaactggatttggtagaggctcggtgttatgggttgaattgtgatgccgcccccctgccaaaaagatacgttagaatcccagcccccggtaactcagaatagaaccttatttggaggtagtgtcttgacaaaggtaattaagttaaaatgaagttgtttgggtggaatctaatccaatatgactggtatttttatagaaaggggaaatttagactgagacagagacatgcatacagggaagaatgccatgtgatgcctggaattatgctgccacaagccaaggagctactgcaagttagcaggaaggcctgggacaggcccttctctagcacctgcagaggaagcagccctgtggacaccttgatctcaaacttccagggcagtaagacaaccatgtctgtggtttaagctaccccattcatgggactttgttatgacagcccttggaattgaatatgcttggtgactcaactcttatgtgctcatctagcatacagttccctctcatctccaagcctccgtttcctcatccctaaaatagaatccaaagcccctagctgtttaagggctctataattagaaagcttctgacagaaagtccccatcagctcctcccagtttagcagtaaacccatccacctaggtgtcctctaaattaggtaagtgaccctagaagaaagttccacacatcatctgaaccgcggataaaatgcatgcagaaatgactttattcaaattcaagagtttacattttacttaactctggaaaactcagagtttaaacattttcacatttttttttaaatagcaagaatggcatgccacatcatgatgattcagctctcatctctatttctctaggcagaatgcatttacacatcatccaatcccaccctatttccatgtactattagcagaagcaaatatcagccttcttcaggccctggcaggataaaaattcagcccagtagacactgggaggacaagaatgaggatgtgacttacattccccagggccatggcattcaaaaccaccatacccactgaatgtgcttctctatcgctttgtttaatatttggagagtagtgtttgctccaaaacttgtaaaaagtgagaccaatggaaaccattggtccaaagcaatcttacctgagaaacattttaaaaagaagtctttcccttatgattcctcttcttactctacttttttgaataaagagattaatacccaaccgatgactactgcaaggatgaaggttattctttaggagaaaaaaaaattgtaacatacatttttatgaaaaaaagatttctaaatatgctgataaaatcactgacatctcagtaaatatagtttattcctaggaagtgactagaatgattgatttagctatatgtaagttatttaatactgtttgaaaggtacttcatcaacaccatttactgtgatcaatagcattttcaggaacacttcagacttggggaggttactcctttgggtaaccttttaggattatctgttgtgggaacaagaagtagccatcaaaagccactgagcaggctgggtgctataatcccagcattttgggaggctgaagtgggaggactgcttgaacccaggggtttgagaccagcctggacaacatggtgagatcccctatctacaaaaactatattaaaaaaatttagcttgttgtagtgtacacacctattgtcccagttgctcaggaggctggggtgggagaatcacttgaccccaggaggtcaaggctgcagttagcattgcttgtgccactgcagtccagcctaggtgaaagagtgagaccctgtctcaaaaaaaaaaaaaaaatgtccctctaagcagttaaaataggtcaacatcaaagctcatggttctggctcttagtcaaagcctatttatatctgacataattctcatatattgcatatattgacctgtttggtttactaatccacattagaggccaacagtatagaaccagaatcagaaaatctattaaaaggaaatgaaagaataaaaaagcatggcaatatcaggccattaggtgtgggtacaaataatctcccaaaccacagtagtctctgagtgtttcactgacaaagtttagttatcgataattataattatgaccttgaaatcctagcgtagacattgaatactatgtttggaagtcagggaattgtttaatatatttaagaaagatattcccttcaaagcagttcaagtggtcttagtattgccagttaaggaagtgggttacaggatcctggaatgactcagtgatatagaaaggctcagtccctggcaatgtcagatgagtgaagaggttgatgcaaaagtaattgtgatttttgccattacttttaaatgtaaagtacaggcactaacatagtattagttactaatagtattagttatttagtaaattacttttgtactaacctaatactatgttagtgcctgtacaaataatgtgcagtaaaaacaatgagtgtgtgtgtgtgtgtgtgtgtgtgtgtgtgtgtattggaaagcagttgatctgtacacatacttacagtttactaaacaaatgtttgagtgcctactgtgtgtcttgctttggctgtgctctagacagtcatgataacagagatccctggtctggggaggtcccactctcagagcaattacggaagaagggtagaggaaatcatgcaagtatgtagggataggctgatgagagcggaagcatgagggctgagagctgcaggctgtcttcccactagtcagggaaggctttctgattaaagaaaattttcatcacctatgcttagaagtttagactcagaataactgatggcaaatggaaaagatgaaataaactaggatgagaagacaagactgcccaattcacacaatgaatccagtctctgaatcagtcgggtgctagccaaagcagaaatatttccagcagagccctgggaacagagaaggaggcagtttttattaaagtcttagtttccaaatgatggatgccaacaagaaaatagtttaaaattccaagagaagccttcacctttcattccattgtagagtaatggctttttcaaacacattcaaataaagccagggttgttaagtagtatgtctcaatcaacatactcaaagtctgtgaaccaaaggcatagtcttaggcttcctcttatagtctagcatgatattattctatttcatctttttttatatgtttgctcccttgagtgttttagaatgagactgctagattttatgtttctaaagctggttttctaccaggcctgttytcagaacattctttttttttttttttttttttttttttttttttwaagatagagtcttactctgtcacccargctggagtgcagtggcgcgatcttggctcactgcaaccttcgcctcccgggttcaaacgattctcctgcctcagcctcctgagtagctggaattacaggcgcccaccactaaccccatctaatttttgtattttttagtacaaaatgggatttcgccataatggccaggctggtctcaaacacctgacctcaggtgatctgcccgcctcggcctcccaaagtgctgggattacaagcatgagccaccacgcccagcctagaacattctttcttggaaaggaagaacatcacagccttctgtgcattctcttgttcacccacataggcaaggtgatgtgtttgcagccttctttttaccctcacctctgggaggtggccttggctcatcacctattgtttcatgctctctcttaaaggctgatttggtgactgaattcatcattgctgcctacacacccatggggctagcctgggcaaaatgtgcctcgtaggttgcctgaccttttgccttttggcaacgtttatcacctctgaggattcagcttctttcgtcagaaagtgagaacttggatcaggtcatctctaaggttcctttcagttttaacctttcagaagtcacacaaccataaacatttggtgtacctagactgttggcttattgtccgactttaagccagtcatttcagttaaacaaacaaaaatgggggcttgccagagtcaagtcatacaagactgctttcctaatatttggtgcttcttaaatgaagttgttatttatgcatccctcaatcccctccctcttctgcatattttgaacttgcaaagccttctgatattttaagcagaaggttgcaaatgcttgtcctactgcctggccaagtcttaggtaaaaattgtcacctaaccacatcctcagatcatttcccctgtactctagatcactaagcgcatgtgcacacacacgcatgcacgcgcrcacacacacacacacaccatccaggatcctcctgaggatgaatgaatattcctgggccaaatattgcatgaggatttgggcaatgttttggctagttgaacaacaacaatgctcatatttatgccaattggcaggaccattgcttgatcatcctgtacttggtgaagggcattttttattgtttccttttttgtttgtttgtttgtttgttttgtgaggcagaatatcaccctgtcccacagactggagtacaatggcatgatcttggctcactgcaacctctgcctcctgggtcctagcaattctcctgcctcagcctctcgagtagctgggattacaggtgcccaccaccacatcgggctaatttttgtatttttagttgagacagggtttcgccatgttggtcaggctggtctcgaactcctgacctcaggtaatccacctgcctcggcctcccaaagtgctgggattacaggtgtgagccaccatgcctggcccaagggcattgttttctaatccagataactaagctatccttagggtgatatgtaatgcagcaattgctagaaaatgacatgttttcataatggatctttctccaccatctagaaatttaggtaaagttgaaagaaaggataggaggaaccatttactgtgcacctactttcttcctgagattttatacatgtcatttgatgtttacaccaagtttttgaggtcaatctcatatccaaagctctaatcaattaactttaaattagttaatgacagggctctcttattcttaaacctgtcatttcccctaaactatgttgttttcctaaagtgagattaaaagtttgaaaacaaaggaacaaaatgttcatttatttactacgtttctgaaaacttgcatatatcttaatatatatatatatcttatttatatgtcttatttcattgttatgaaaacckagctttctttccttctatcctttcaatattatgctacttgtatttagtatttacattgtatgattcaaaatattgttcactgcagagccaagtagtagactatgaccgctctgcttattttgaacaatcttttatttttttctggagttgataattgcttcagatttttgtctggctttttataagcctgttgataatttcctgtttattctaatgtctgtcatatgcctatccatggagttaacctagtttcattttgtttttcatggccacatctttatcctcctttctgtgggggccctcagcttctgctttaattccagctagatactttctgctttcattcccgctatatactctaattccagctagatactttctgctttcattcctgctatatactttaattccagctagatactttctatgtgggctgcaaaggtgtagccctgatacttttctcatctatcatcctgagacttcatcttacaattaccctgttttccaaatctcatgccttctacttccttcctttactctccatttagaatatttttcagcagcttctaaattagcctacataagacataaactcttagatcttacttgtctgaaatgtctttcacatatgattggtatttgagctaaacataaattagagattgaaagtcatttctcttcagaattttgaagacttctctactctttttctttctgctgttgtttttgagaagtccaataacatatttctaatcctttgtattttgtttcctctctgaaaactacttagatattcttttattacaaatattctaaaatttagtaatttttaaaattctctcattgttttaaactttttttttgagtggagtttcactctttttgcccatgctggagtgcaatgacacgatcttagttcactgcaacctccgcctcctgggttcatgtgattctactgcctcagcctcctgagtagctgggattacaggtgcgcaccatcatgcccaactaattttgtattttttgtagakacaggatttcaccatgttggccaggctggtctcaaactcctgacctcagatgatctgcccgtctcagcctcccaaagggctgggattacaggcattagccactgcacccggcctgttttaaacatttaatggactcaccagggaattttcttgtcttattactttgataatttcctccactccattttccctctaatatttttactttcggggattcctatgagtttgacattggttcttctggactaatgtttcctctagtgttttttgaagatgtctttttggattaaattctagaaaccgcctcaactttatatttcattgttgctcttgatggttttaatgcagatactgaatttccaagagtgctttagttgttctcttagtgttcatttcatagagcacgttgttctcctttaagaggtcatatcttctctttaacttccaggatttttttaaccgttttgtctgttctttatattatgttacttttctctcatttgctccacttcctccccaccccacccctgtttatttagatctcttcctttcatagtgaaggttcttctcaattcactagctacctcaactgtccctttgtatttgagaacaaggcattgagaagcattattttggaagctctgtgtgcatgaccaggacttgtcaaagactggagcttatcacaaggggatcagatagaaagctgtcttttctataagaggcattcccaatgttagtgtctgcaggccttctagaactggaagcagaaagtccctcctcggcatgtagagtctcactcattcccgtttgcattccatcacctccctgccctgagccctttgcacttgtggtacatgttgtttgaagtatgatgcttcattgattagattccttcaggggtaaaatctccattctcgtgtggggaaggtgatactttaagtcacctggctgtgcagcaacagagagggaccaggtagtctaataacaccttatgcagacttccaactcttgtttctcactataccttattctataaacttctggggaaacggctttctttgaattctgagcctttcttaggtatatttcaggccaacttacttgtaccttgtccatacacttgtcaactggcacccaagttcaggcagtctccattttaatcaatcagctgctgctcatccacctttcattttatcttccaaaatattgttataattcttatgcattggttagcttcttttctttaactttgtccttgtggattactactcattttggtcttttattgttactttagtggcatttcaggaggaaatggaatggaagtgtgaggtcaatgcagcatatcaaccagaatctagcctgaattgcaactgtctcacaataggtgccggactctgcagttatggttctagatagtacaaaatttcctctctcttatgagaaatatgaaatcatttaaagcagttaccttttctaaacaattccatggactctgagtcaaaataatttggcaatcatttattccaacctctcctggatgcctaaactatatccctaagaggtgattttacaatcttgaattgaatctctccagtgataaggaatttacttacacatgaaatgattcattacattttcaagtcatgttgtggtaagagttagagtgcttctaagtatctttgttaactcctaaaatctgagtcttacaaataactgacttatcaagttgtaaaaagtaaagagaaaatccccatttctcctactttaaatagaccgtagaaaataatgatgtccaaatttgtcaaatacgtcaaactcaactgcatataggaccattggtgtacttataatccaagaagtgccaacacaaccatatggcatcagttgaagggacctcaagaagttaatgtggatttcacagtggcaaggctgatggctttagtcttgctgaaagttctgcttgtttgatgagaaatatttatataatattttcagaggcttatttcttgtatgtaaactctcagatgtgaaagggaattcatttgctgcatattgattagctcgttgagtgttaatttctcatggttgtggtctgcatgagagaactacaatcagctagagtcaaagaaaagtggatgcttccaccagctgatttttattttatttttatttataatatggaacactactgtaaaagaatctttgcctgtctttccactttataattataaagaaaaggaaaaaaagaggttagagggcccttcaaggtactttaaaatgtttttttcttagcaattcaaaatgtcctagtgaaacgggagagttccctgactcccttcacaggacttgtgacaggggtgtcttgtttatttggcctcagtgctcaaaccccttatgggatggggaacatgcaggtgcacaggagcagaagccagggtgagtgcttttgggctccagccccacagtggtgtctaggggtgttacaatgctcttttagccctgccatctggagatggcttaagtgttaaacagctcagtgaaaagtcagtgtgacagccttttggggttcccatacccagtgtgtcctgaattcttgttcagtgtccatgaagaatgaggtcatacagacctgaaggctggtgaatgtggggattttgttgagtgatggaggtggctctcagcaggaaggggaacgggagaggggacggagtgggaagatgatcttcccctgtagttcatcggtcccgtagctgatttcctctctgtccacagctaaactcctcttgaccttcagacacttcctctcttccctcctctgctgcactgctctgctgctctgccactcttctgcttgtggagcctggatattggggtttatatggatgggcacacgatagggggttgcagtgggtcaaaaggcaacatttgggtgcaaaaacaggaatgcctgttctcacttagggctgcaggtctacgcttgagggtggaaccctcgccaggaactcttttgcctcctgtccatatcactaggaagaccattgatgtgtttgatctttgtaaaactacatatgactctcaagttgcaagtgatactgtggttcagcttatcaaatactggaatttggcttctgtcactgactctgccactggctttgtggtcctgaacgcagccctgatgtcagatgtgttggtaatcttggggaactttaagcaagccagctttttttttttttttttttttttttaggactagatggaggtaagggaaagtgtgagacaataaaactggcaaccagaaacagaagaagaaaggaagagagaaaggaatctacggagtgtggaagttttaggagtaaatttctatataagttgcaaaattttagtaattctttagttcttatttcatttattcacttattttttttttcttttkagacagagcctcactttgtctggagtgcagtggtgcaatcttggctcatgcaacctctgtctcccagcttcaagcagttctcctgcctcagcctccccagtagctgggactacaggcaccagctaactttttttatttttagtagagatgggatttcaccgggttggccaggctggtctcgaactcctgacctcaagtgatccaccttccttgtcttcccaaagtgctgagattatagacgtgagccaccacacccagcctcattcattcatttattcattcaacaagtattaattgtgtgcctactataggccaagtgtattttgggccaagtgcatttctatgagctaaggatatagcagggaataaaacagttacctccatcctcatggcacttacattcatgtacctgcaatccccatcagaatcagcaactaggaagagatgatatcagagcttgaacgtggatccagtaatacccatggatagttctgtggaagtaccacagagaaaaattcaaaggaaagaggaataggatatattgagatacaaaaagtgtagcaatggaaaatcaggtgatcagattattgagaatgaaatatctttagtaaagatttgaaggagttgagtagagatatctcctagatatctacacctacatagaagatcatgccaagaggaggagcagcatgttcaaaggagagaatgggtatgacatgtttgaagaatagtcagtagtttggtatggctacagctgactcagtgagatgggaatgaggtcagaaagatgaggaaagggcagtccagattgtgttgggctttgcttgcaaaaacttcagctcttacttggtataagacagcaaaccattgaaagagtttgtgtagaggagtgacatgatctgacttcttttttaacaagatggctcttattgtatcattaacagcatggttttacatgaacctatcgttttgtttagtttgtgggtcaggactgaacaatgaaagtagaagcagtcctgtgacagtggcactaattacatttattgtcatagagaaagctcatgccagtcacatactagtcagaggagttttcagtcctaattgccacagaacaaatgactttggatgttaaatggactatagtcccctcatttgcaaagtggggatagtagtatctatatagtgaattatgagaagtaaatgagaaataacatttgtgaaaatgtctgacaaaatgcctgaggtgttaacggatcttttaaaatgttaactgtagcctcaatggattgtaagaatatacacatttaaacccattgacataaattatggctagaatgaaagttttgatcatcttgatgatagtttttgtcttttgggtttctttcttgtgtgttctatctgaagaaaatcatctgaaatccctcatttagaaattgaaatattttatgtcagcaagcacatatgttaatgatttcctgaatcagaaatgtgttcaaaatcatatctatagcaatgatcaccacagcggtagttctattagggaaaatacacgaaaacaaatataaaacaataacaaattaagtaactaattaaataatgtgtggcatggaaataaatgaaatactgtgcaaccttcgaacaccattttatagaacaaataatcattggagaagtagacgtgatatgttgttaagtaaacatatcatataaatggcttagaggcttagagatgtrtaggaaaggaaatactctaaaatgttaacaagaatggtatctctggtgcaattaaaagtctttttaatttggatgggtttttttatattttacaaatatttctgcattgattctacattacttatgtaatcaaaggtgcccaatacgtgttacttaaagaatctcttcaataattagaacgtaggcactcaatgctcatttttttccccagtgattctctgaacgtgtgttactaccatccaggagcagaactatatcttgctgagacatttgtgataatgacaaaacgtttcaatcagaaatttgagataaggatatataaatgattttttctcatgagaaataaaacgcaggtgtgttcaccaaaatcctgctcttttactcaatccccttggccaaaagtaagcacgacctctctggcattgtgaacaaaaagaggaattaactcaaaaagactaattttatgcattagatgatcctttagaataatcaagcatatgagtattagggtaacttatcctttttacttttcctgagggaggtaagagtagcaccgacttgctactgctaaagatatggactattggcctgggagggtaagcattttctgtctgatttaattaagaccactacctgctgacaaggctttgagaaagaaacaaaaataaggaatgcacaaataaaatgtaatgcaggtcaggcatggtggctgatgcctaagtgggaggcttaggcaggtaatcacttgaggccagaagtttgagaccaggctgggcagcacaccaagaccatctctctacaaaaaaaaaaaaaaaaatacaaattagccatgtgtggtgatggatgtctgttgtccagctagtcaggaggctgaggtgggagaatcccttgaggccagttcaaggttacaatgagctatgatcatgccactgcactccagcctgaacaacagaatgagaccctgtctcattcaattctttaaaaatctaatgcaaaaacattagaactgaaactagaaccagttttattggaagatgatggaaaagcaccttgtgatttatctcttttggtagcagagagctcatgatcgtccatctaactcccacaccatcttggagagccacagggtatcctacattatcctgctgaagatccttcagtacctaatggctctcgtgaagcattccaaagtgaaagtcatggagcctatgccactaaatcagatataactagatacatgttggattaaaaggaaaggaggaaaggcatakaagggaaaaacagagattattggagaccaaatacctctataaattctcaaaatttgtttaaaggctttactttttcaagatgcatattttggcaatagcttacgaagactgaagttttcttatttaatcttagagatactaatacttagaaaagaaaagtcttctatcttgttgaccttctctgtagccatttgaaatcttcattatcagaataatgcccctccatgtccacaattattaatttttatagatttagggggtacaagtgcagtttcattacatggatgtattgtgtaatggtgaagtctcggctttttgtgtagccatcacctgaatatagtgtacattgtacgcattaagtaattcctcatccctttcccacaacctccacccttctgagtctccagtgtctataattccactttctgtgtccacgtgtacacgttatttagcagccacttataagtgagaacatgcagtatttgactttctgtttctgagttattcatgaccagaattattattctaattattgtgaaataaaaattatgcctgactaaaatgactgaatccagaacttcaccataatccatctatctcctccgtgagtcagtgcatattacctattccaatgacctcttcagtactgtaaatattactgtgttccttttatttacttaataaatagatgtcaaatgtgtggaaaacaacatttgttttttcaaatacatgtttataacaccctttggaggaagtaagcctctagaacatgacagtctctggggtatgctattttcaggtaattttaaatgtcgctttccaacaaaaatgcaatactattatctttttttttaatgacaaagaaaagcaaaacaagtattatattggtgcaaaagtaatgcagtttctgccatttctcttaatgccattactcgtaagggcagaaatgaccattacttttgcatcaacctaatacctccagattttagatatttgagtgccattgcttgatatatcttttgttttttcttctggaaattttggttactttagttgcataaaggatgacttccattwtaccctgttaagcatctctgtctggtcagaagctactactctgttctttctagttcagtagggaacaatcagtttccttctcaattttcagctaatctttatgaatgaaatttgattaaatctagcaaaactatgcaaacatcataacagcatatggggagccttcctgtagtaccagtgggctatttccgtctaataacagattcaaaaaatccaattagacagtttgaaaaaagaaagccagagttaaaaatatctgactgtttgactgagaacagcagggaatggtttataggccaatcatttatggtgaataggatcttagtggtgagcaactcacatctctagcccattagaataatktgttactcatattgctcctaaagctttctacttaattataccaagttaaatagcagacattctcactcccttttgatggaaaatcacatttattcacccacacaataccatccttgggtgttaagggatgagagttgacctaatgggaagacaaacaaatggtttaggaaatgagacatgatttttttacacaaaggttaatgcacgagaaaagaaatgcctaggtctctgtctaatgtctatgtgttctcatcgaataattcttaaatgaccctatttagtttgattttctaactacattagaaatatatgaaacaattaagaaatcattttttacctgtcatatggcagatggactaacattgatcagggcagtcgaggaggttgtaaggaaatgggtactctcaaacattgctggtgggactatgaagtgttttaattttttttttttttttagacggaggtttgctcttgttgtccaggctggagtgaaatggcgtgatctcggctcactgcatcctctgcctcagcctcccgagtagctggaattacaggcaccctccaccatgcccagctaatttttgtattttcagtagagacagggtttcaccatgttggccaggctggtcttaaactcctaacctcaggtgatccgcccacgtcggcctcccaaagtgctgggattacaggcgtgaaccaccgggcccagccaagtgttttaatttttaaaaactatttgaccatatgaaaatatagatgttccattaaatatatatagcctaagaaatataatcagcaatgcagtaaaagattatgtrtacggatgctcctgacagttggatttacaatagggaaaagctggaaacaacctaaatatttgaaaaaagagaatggtaaatacatcaaaaatacaataaatacagtgttaagtgaaaagtttgtgcaattttgacttgagaaatttttaatgtactatgactacttggaagaatatggatgtacctcaaaataagtaatgatctatatgaaagactgtttttgataatttttgttttcttatacataccttccaatattgtccaaattttcaataataagcatgcatagcctaatatatcatgtagatgagtgcaaaatgaacacagagattaagatcatgggcttttcaatgaaggtctgagtttgaatcctgtctctgccatttactagcaatataatttcaggaaataacttaacatctctgctcttcagtttcctcatctgaaatataaggataataatggtatctgtgccttaaggatgaccaaagttatagatatcttaagaatgaattaaatgcgtttctctccatggactattttaacaatgaatgcctgacatagcaattatgttccataatcaccattatttatttataaaattatttagtattatttaatactaacattctggttttataaaaccaaattttaaaaatagataagtaaatgaaaggacaaggaaaacctaatttcactgtttttctagctttttttattgctataacttttatatcataaatccacccatttgaagtgtatagctccattttactatactgttttcatttataaaagccttttataaatttatacatacctttcagtgttgtttgaattttccatagcaagcattcatagcatagtatatcatgtagcagggtttaaaataagcatagaagagggtttcgccaaaagattatttaagaaaatctactaaaagagggttcttctgaaaaataaaatgtatttgcttttatcaaatgagcaaacttcatccacttggagatcacccacatgtgaatttctttctttctttctctctttcccttccttccttccttccttccttccttccttccttccttccttccttccttccttccttccttcttactttctttctctgatggtaagttacattagaggacaggaaggctcagtgatcagttttgatgggatggctgcacagaggcacatggagaagaagcaaggaagccaccttcagcttctgggtctctttgttatacaggaaaggaagtcaactggggtaaacctgtttggaaaggattgagtccttctctcaattttgaagggatgattttttagttcttcagatttatcttctgtaaataaatttcttcagaagcttcctgcaatatgataaacacaaatgattaggaagtgttttgtaaggattggggactaaagaaattattgatgaagccagaatgtgtcaaaaaggtgtcgtaaagcagcaatacttaaacattttggtctcagagtccctttacaatccaggacccaaagaggtttttttgtgtttgttttttgtttttttctaaaatgggttatacctatcatttttttcatattagaaattaaaactgagaaatgtttgaacacaggaatacccaagtacatattccagtgatcagcagagcaatggcatcatcacatcatattgcctccagaaaatcccactgacaatttgttgaagactaaaagggaaaaagccaaacaccttagtatgctgtaaaaayagctttcatctcacagacctcccgaaagggtcttgaagatccatgagcaatccctggaccacactttgagaaccgcttttgtaacgtgtgaccttcccttatcctctgccatgcraaactatctcagaatctaagattgtctacagccacggtacaaccagctctgagactttgaagagaagaaaagatgaacttcatcactaaaaaagccaaagtagttgaaagcaaacactagcygaattttcttcctccaagcctacagaccacctcacgtagtagctgtagtgggagctgctcccaagatttgataagaattagtaaagaggtttataagaccgtgtgtgcagagtctcacagttgctgatacttgttgggcttagctttatctctgtctacagtagcagcccaggacaaaacattcatatgatattctctctttcttctttaaccatagataaatgtcccaagaaaagggaagagaaacagaaaaatcatacatgctaaacaccagtttattaaatatatttgttgctgtttttcttttttacttggttgctcacaatattaatacaccctctttataaaacatgaaagcaatacaaaagtataatgagtaaaatgagaatcctaaaatgttttcttccataatcctctctctaatcgcatttctcagagataactgtgttagcattttggtgtgtttcttatagccctttttgttgtcaaaaataagcaaagataaaggggaaagattttgttctgtttcttttttctatatacacagtatatcttggagatagtttcaagtgccaaatacatgcatttatttttttcacagaatgcaagtcatgtcatagcatggaygaagttgggtttatttaatcattcactagttggcaggtatttaggttgtttacagtttttccattttagaaacagtgttcccatgtaaagaatgtcccttgtgcataaatcgttgtgacatgtgttggaatctcaaaagtggaattgctgagccaggggcatcctcattttaaaatttaatagacatcatcattatcctctagcatgcacatcactttacacaactgatggtaatttatgaggaattctatgtcccctcactccaacactgcatctagtcactctttgaaaattgtccagtctaatgggtgaattatggcatcttgctttgttatgcatttctgtgattaccagtgaacttgaacatctttccatatttttatttatgtttaacatcgaaacacgttacgttttgaatattttcctctactctattactgccttttatccttgattatagtttcttccatcacacagcaggcttgaatttttgtgtacttaaatttgccaatcttttcatttctggttcctgagtttttttgtttaacttaggaaccacctcctcccatactatctccaaggatagaaaaatactgttttctcctagagcttttgtgaactttattttttacaattatatctttagtccattgatggctgtgccttttaaataatgaaaagtccatatttaagttatttttttcccaaatagataaacatttgccttacaggatttagtaagcattttatcctttcttcctacatttgaattgccacctttaacacagggatattaggtaacttaagaggtaaatgtgtgtttcttgaatcccagatctaccacttaaaaattatgtaaggtttgatttactgattcatttttcctgccccaccaacttcatgaccataaaataggggcaggggagaaggaaatgataagacttagcatattataccatatggaaattaartaatacacataaaatacttaaaatagygtcaggcaatttaagagcactcagtaaagttagctcttattaaatttttgcaactccatgtatacctgggatctgtttctggtttgttcatggcagcattgtcaactaaaactttctgtgctattcagtgtgatagttattggacacaatgaccactgaaaacatggctagaatgatgggaaaattaaaattttaattaattttaatttaaagataaacagccacatgtggtcagtargtaccatattggacaggagaatgcccatatagtattttccatgagctttcatgagttatgctttattatataaaccagattttatttaagaactcatatggactagattatgaattttatgagatgattttccttgagtcatcaagaagaacacagtttttttctttaatctgttaaagttgggaagtattaatataaatctagttcctacttgaaatcaacattccagcaataaaccttattggttcttgttattctttgacctcacggttaaatttgatttgctaattttggttagagctcttctatattcatatttgagattattttaaatttgcattgtgcattgactgtgagatgagtattttgttggcttggtaaaatgaattaggagacttcatrttctaaattctgaaatagtttgaatattggagttattatctgttcttgggagatggtttttatcaccagttcccctaaactcctttttaccttgaggtaaagcaaagtctaccttactatttcttgtatggtgattggctattcaggttttctatctattattaagacaattttgaactcactggtgctccaaagaaaatctgaatcattctattacaaagatacaggctcacatatgttcactgcagcactcttcacaatagcaaagacatggaatttacccaaatacccatcattgatagactggataaagaaaatgtggtacatatacaccatggaatactatgcagccataaaaaggaagaagatcatatcctttgcagggacatggatggagctagaagctattatcctcagcaaactaacacaggaacagaaaaccaaacaccacatgttcttacttataaatgggggctgaaaaatgagagcacatggacacaggagggtaacaacacacactggggcctgtcggggagcatgggagggagaacatcagaataaatagctaatgcatgttgggcttaatacataggtgatgggtcgataggtgcagcaaaccaccatggcacatgtttacctatgtgacaaacctgcacatcttgcacatgtatcccggaacttaaaattttaaaaaaatttaaaaaaaaagaaaatctgaacttgggtagcaatatctctacctaatgatactcttgatttttaagtacttaaaatgagtctgaaactgtagaggaagaaaaattcttcctaccaccctcctcctttctctggctggggctttgtaaattggactgacaaagacagcttaacaagagagaagcaggagtttattagtgtgtgcattgggctcacacgtgggagcactcagacgtgagtaactccaagggctggtaagaccttgagctaatatagaatctcagcaaaggaacaataaatttttagagaaatgacaagacaaaggaacgaactttgagtttctagggtggcagactgtgggaaagcaaatatatgggaaacctattgtagataaagattagttagggaagtttatgtggatgcctgtggttccgtctctggactcctaagggtctagagttgtctctgatgattaacttttatccttcctagtagagaggggagggaaaacacctttgcaaatttgtgtcctgcttttaggcaaacaggggcagggcagagagcttttcttatagctgttttctctcaaaattctgtcttcacatcaaaataatcccaatgccaaagtggcgtattttggggtggcatattcggctaccctacaggacctatgcaaagatatatctttatatatatttaaaccatagttttcaacaaagttggaaacaagaataaggattgatttaaaagatattatatagccattgacatcatgctgcataaaacctatttaattctcatctaactggtagattatacaaataataacattgctttcctttggatattagcattggaaagagtgttttttgccagccttgatggtgcacccctgcagtcccagatacttgggaggctgaggtgggaggatcacttgatcccaggggttcgaggctgcagtgagctgtgattgcaccactgcattccatcctgggcaacaaagtgagacactgtcaatcaagaaagagaaaaagaaagagagagagagagagagaattctttttccttttctttcaaggaaaaatcagaaaatgagtggttgatcttagttcaattaaagaaaacaaaacaaacctgctgggtgcctcctctgctctaaatactaagcaagaaataaagtgaataagcccctgccagtcatgtaactaaactctgaatgagggaagtagctaaaatgttacacataaaagaaagctgaatgggaaaaatgcatggaaattatgagtttagggacattttcacttggccaaatgccccattctctttctctacttccaggtcattgtgataggtattttaaatgaacttgaataatcccttaggacagggttgcctgaggaaatgggggacacccagtcaaattggaatttcagataaacaacaaataatttttagcagaattgtgtcctatgcttacttatactaatatatatacatatattttatttgcctgaaattcatatttatctgcactatatctggaaacattaagaataaattgtaacatcttgtatttgtataaggcaacattttaccaatcttttcttcagaatactagttttatgaaactcagcaaaaagggctatgtggtcccaaaagttgagaaggcatttcgtgctatagctcctcttgcttacagctgttaacttggagtgataatcacctgttctgacaaccagcatagactggactccttctagctgttaacacctctgcagcaggactgagaaaggactggagagccacgtgctatggtttacacctctgagcatttgctgtgtgccagccatcacactacatgctttacatacttcatctcactaatcctcacacacttatgaggaaactactgagagtgtatgcatgaggaaatgcctcagagaggttcagcaacttgcccaaggtctcacagttgtaagggacagagtctgaatctattgcctctatacttaatcaataaagattcattatatgcattagctcatcaaaggttctaagatgtctagagtaaggaaaatttttgactttgtttaaataaccatttcctggaagcaccatcgaaaacattggtagttgcagggtrcagtggctcacacctgtaatcccagcaatttgggagaccaaggcaagaggataacttgagcccaggagttcaagccccatctggccaacatggtgaaaacccgtttctactaaaaatacaaaaactagccaggctggtggtgtgtgcctgtagtcccagctacttgggagtttgaggcaggagaattgcttgaacctgggaagcagaggttgcagtgagccgatatcatgccactgcactccagcctgggagacagagcaagactctgtctcaaaaaaaaaagaaaaataaaggkrgggtgttttatatttatatctacataaatctatacattatctagatattatactatattatggaaatgtatatattatattagaattaatatttctaattatcgtatacagttatacattttattgtgttattataacatattatatataatwggttctgtttttctgaagagccataaataatgcattcaatttagaagacaaactcttttagttggaatgagcctaataaaaataattaccatcccaagccaactttaggttattatttgtctctgacagtattaaattatcattatattaaattcctagaagcactatagaaatggcagcagagtatttatattatatataatataggttatattattagatattaatatattacattacaattgtattatcatgatattatatataaattggttctgtttctcttgacaaccttactaatacatccagtttagaacataaattctattagttggaatgagcctataaaaataattaccattccaaaccaactttaggttrtcatttgtctttgatattattaaattattattattttaagttcctaggagcacaatagaaatgctggcagagtgtttatattaaatataatataaattatatttttagatgtaaatatattactttatgatgacattattgtgatatatatataatataatgagttctttttccctggagaaccttaactaatacatctagttcagaacataattctattagttagagccagcctaacaaaaataattaccttcccaaaccaactttagattatcatttgttttcaaggccatggttctcagccttagttgctcattaaaaatattcggggagggcaggcatgatggctcacacctgtaatccctgcactttgggagaccaaggcgggaggatctcttgagatcaggagttcaagaccagcctggccaacatggtgaaaccccgtctctactaaaaatataaaaattagccgggcgtggtggcacatgtctgtaatcccagctattttggaggctgaggcaggagaaccacttgaacctgggaggcagaggttgcagtaagccaagatcgagccactgaaaccccagcctgggtaagagagtgagaccctgtctcaaaaaaaaaaaaaaaaaaaaaaaaaaaaaaatacttggtgcacttatgaaagcctgcagagcccagaaattctgatttaattgatctaagaaaagggagaggtaaaagctcccaggaaagtctagtgcccagccaaaggccatgggagtgatgagtgaccctgcccacacctaacggagcgtcccctgctctgctagtcagtcaacagaacaccagccaatttctctaagccaagagctggttatttccaacctcccctggaagagtttacttaataccataagaagtmattttctcttccatctactgcaagaaaaaactggatattgcaattgccatcctttttgagttaaaatactctacatttttaaacaaataaataaaaaagcttaaccattttgaaattaccagtagggaagaaatcgggtgaaaaaggagaggaaccatgcattactgagaatactcctgtcccaaatctctctccatatccatttcttaaatttattcattcattttaaaaactcaacttacaattcttgaaatctttacctaggatatgtcagccagtattctagacatctggtatacatcatagaacaaaacagtcctgcccccatgaagtttcattctagcttacccctagtatatgccaggctctgaactaagtctaaaacagatgatccctgcccttccagctccctgcaaagccagcattaataataggagggctttttacagaaaatgaaactgtgacttgtttaagttacaacctgtgagtgttgaagtcagagtaccagtctttcctgtataccttaccacctatttgaaaaatgatggatagttatcttaaacggtgaagaattagtgtaagttcttaaacaaaatagtggcgatattaagatcatgcttgagaaacctaattcttgctgtctccttacatattttaagtttggcctaactctgtctctgtgcatagtgagctgtaatgtaactggatgtgtaaayagattgtagcctactcttgtgccaatctccaagttttggccaatcaaaggtggccaaccattcaaaccatgttcaagtaaggcaaacatcaagctgtaaccaacccaactatttttgtaccttgcttccattttccatatgtcacttttctttttctgttcataaattctctcctaccacgtggcatcacgggggtgctctgaacctcttctggttctggggctgatccattcatgactcattctttgctcaattaaagtctgataatttaatttgtctaaagttttccttttaacacgaccaagagtcacagaytgcttagtctggagaagctactcttggctctatgcagtccacaaaaaatgacatttagaaatggttttccttccctggtctccagagaagcagcggctttcatactctgaaatgcagcatcctcatctgtaagatgcaggtgctaaatgatgactgttgttctttcaaatgttaactttctatgagtcacttcttcattgtatgtgtcaagaagcacaacctcgaaagcctgcctttgacaatgcttagaggttagaggatgccaaatgagcctcatcttctttggctactgagttartaaccatccttcatttatctcagggagcaaaggcaggatttccgtgggtgtccaaggtccttactcacagtcaggatgcatggcagtacccttaataactacagattcagaatcacagaagacatttaccgartatgtattttctgccaaaccctgtgccaggtgttattagaacattacttatgaaatatttggtagtgtggatgaagaggcagcttttcctgcttacacaatacagaaatatgatttcaaaaatctattaaaattttattaatctcagaaggcatgatttctaattgtgtttgatcttacacttgttatgatttaggaattcacatctgagttggttgcatgatgctatagttggcaacaygattctgaccgccaccatcacaaatagaggttagaaaatattacttatgtgaaaataaatgccatttctggcacctaaaacagctcttttctcaccttcctatgatgaggttttattgagcttttgcaggaaagaaaagaaagaaatctgcattcaggtttcaggagtaaagaggctgctcattaacaaagccgtttcaaaatctattgaaatgctccaccacgaatacatgccctattactaaaatcactgtcatttctatgcttttcttctcccttcaatcacataccacccagttttcagttcctataattgccaaaagccatttatgaatctgccttattgtatgggttacaaacgtctattttcctgctctgttcatacacatttgggagcaccttaagatgctgaaacactgrcaaatgcttaatatatttcatttgaaagaattatgatctaaatcttaaagaaacagtgagtaaagtgcagtttctgctgcttggttactgtagttcattcggggaatttcatcttggtcgtgttgaatgcagtggttagatcctgtgaagttgtttaattaaaggtgttctagtagtcaaagccatgtctaaaaccccgtttgtttaattctttagtaatgtcaacattcctaaatttcatgtagcctaagagatttttccactggcttcaaatctgagctttgccactttggtgtcctttgctatgaatgttcaatgaggcgttctgagatcaccaagaatagaagagacacacccccggctgtcagaagtttaaccttggagaatgccatgaagggcaattctggaagaaaaaagagaagggaattcctcgtaggtttaagatcagaaagtggggaaggcgggggtgctcttaaatgcatcagccctactgccagcacagtggggactattaacacatcatattttttttttcctgcagttactcaaccttgcagtgggacaagttgctcaatgacttaccaggagacaattgttatttttaaaaatgtctttcttattttaactacaaggacttggcttgcttagaggctcttgctcaggagtctttaaatgcaaatgagggaaaccccaggttataaagcatctgcttctgcaggttttcaatcctgttaccttagcaacatttgcccttgtattccacgcatcaccttgacagcctgcataatataagggacggagcggagcaggggctcggggtgggagcctggaaagaaaactggggctcaaggaggtttaatatcggttagtagcttgggatccttcggataacggctgggcaatgaaaataaaaagccccatttccagaaatcaaagaacttggggagaaataaacacgctggttcaaaggaggggaaaatatatcagaactagtcggacctaagggagcagatattttccaaaaatatccttcccaccagccatgctgcagatgtgtcactgtggctcagaggcaggccatctgctgcagtgtttccctggaaacccccagcaacgcccctcccggagctcctccgcggtctcccccactccatccccgcgcagcggaggagcttgccggtgatgtcactgctgctagctgggagggaatcccaggacctgcgtccctcgggtagagccaatcatggtcggctctggatgctggaaacctggggcttttaaccagaaagaattgcaaaagcaatatgcaattcatcacagtccacaaagcacagttcctaacagattctgaaaacgtgattttaaaaaaaatgagatttatccgtaaacgagggctaggctacagttggtagggcggctgtcaattcttctacggagttttaacctacactcaatggatgcatgaaaaaaagaaatgaaatgatttttttagctactttaaaaaataaaggtaatgaatatttcttatctatatgcatatatatatatatttcattataattgttgcttctgcagaaaattgggatagaaatctcagatgagctgtagttacacggagatctacagcaatgcaatgtttagctagcatgcattttgtcatccaaggctagtaggtgaaatatttcctttacctgtcttgatgcacggtggagaaakgagacccgcttcgttttccctctaatctagagagttaacctcctccaggtagggttgaaaatatgaacagagctgcttttgcaagactgtgttgcctctaaatgtgatttaactcgcatattcagaatcttagcaaaaataaataaataaatagtaagatggggtaaggcaaatacatagatattttggagatcttatcccttattcaaggactgtagattattacagctttgttgtcatattatytctaggcagtaaatcatagtaaagtagtaaattcatagggaatgaattaatctcctttttgttttgttttctctgaaaaagagggtgtgattacagcatatattgattgggtactgattatgggacattttcattgtatttgttgttgttgcagtagactaaatgtcgagcccgtgaatctcttgtgttggcattgtcagaaaaaagttgtattttttttaaactggtctaaaaggaaaaaaattgaacatatatctttatattttttttgctctcttctcaaccatgtttagtgttttgtttatattcaaaggattttattttcacacttacaattctttacttgtctgtcattcaaatctttgttaccaaaacagtttgctctttttcatcattcactaagcattcctttcacagctaagctaaagtgtctatatggaaacatacatayacacacacacacacacacacacacacacatgcacacacactttttccaggccacagacaggaagatatgtgtaaatgtatacatgttttcagtagcatatatacacaagggtctccaataagatttttctagaaacaaaggctgatactacttcatttcatattattgtaaagtgctaattctaagtaaaagtagactaaaaaagagataaaaataaagataaaaatgagtgggctctcacaaccttgtttttttctttttgtttttcacttactctcttggctttttaactccttccttctctgcctcttatgaatgacaccaggaagagttattgtaaacaattggaatttctaaagttctgtgtaactgttagtatattcactatatgcatggtataatttataaaattaatctttgaaactgttaacccctagaaacagaaagaaagaaagaaaaaaagaaagaaacataaagaaatcttgacccactataaatcctgttttctctgccatctcccccagttacacccagggcaagtctatcttcttcaaagacattcagtcagcccacagctttttatcttttcaaacctttaatggcaccattagctacggaaccttgatttccttaatttttcccccactgtcactgcaaccatcacatgtggctctcagagcttctagttccctggaaacaggakttctatctgccatcaccaggtataaggtgccaccacttgaagggatctgccctatcaaaaatgaggaaatatattgatcaaaatggctggagaaagtgaccagccaaaacacagcttcacagtcttgcctgttttaagtagattctatttccattttgccggtgacagcactaagcaaataagcaatgttgccaatccgagaacagcctgcattcaaggtattcaatcaatcaaagagagacaatggcattctctcaaagatcagatgttttgtagtgcaactatgttgttctgtttttctttacttcaattatcagatagacaggaaaaaatacaacaaaatagcatgtagttgatttgccaaaaataaatagcaaagaaaaaacaagaataactagaaaacacgtgacaattttagaaaaaatgtaatcacatttccaattactagacaagatataaataaagagcatttataaaatgtttaaatccattcttttaaaacgataaacaacttctctaactggaaattactgtgcagctgctactttgtattttattggtataaaataactttagagttctatttcattgcattgcaaaggtgtaatactttgccataattaggtttaaatcttgcaaaaatagaaacctgcattttttggttttatattagtttttttaggtgatgctattcaatgggaggatataattgctgtttctatgaccttgggtaagtcatttaacccctctgaaccttggtttccttctttggttgaaaatagagacagtaatacttgacctctctctccagattttgatcaggttaaagaggccaataaaaatgaatgtgattttgtaaatagtgatacacacatctgatgcactgttgtgtatttttgcacctcctcagcagtgctctagctagtctgtccttgtccttgtcaactgtacgtgaacatgatgccctctagtgactgcactttgtagatgctgtaggccccaaggaagccttgagaggaaaaaagagcttaatgaagttagagaagggaagggaggcccgtagcggaaaattatgggttataaaccaataaaagcagcaggaaaaataagcagcagctgactatgagtaagaggacaagatgcacaaagagggagaagagaaaataagcagaatagagagagaggtgagatgtagctgattttggaagagttcactgtggcctggaaggagaggaacaggaatctctgcccagctttgtttataaccggcagtaggtccttccgttcatgtaagctctgccctccacaactcaccctgtgactgcaaaatgagatagttaaaattaaggttcagaattctttgagtcaatgtaagaagatgagcgaaaagtacaatgaaaatgagaactgaaggaggaagagtctgtggaagcaatttccagaatcttgtttactgtgtctaaggtcacctcagtattgcagtaacttaataacaaccaagcggctgaatgaggcaagctcaggtggggtttggtcgatcgcaggatgatcctgtactcttgtagtaacaggagtgttttgcagtacagctccacccttcacaaggatccagcccctgtgagattgcatcctcttagactgaatgcctaggagtctcactgactacctgtctgaagagctccttcttcttttctgaattaatccttctttacttagaactatctgaggatcaagtgatcttccagtgggaggatatttaaacccagcttccccttgcaaattacagatgctataatcctgtctgcattaggcttaggtcatgctttctctaaacgaactgtgtattacaggaaagtaatcaaagtccacaagaactgtgtaattaaaccagtgatggtgcaaataatccagaagtctgtcattgctctctctagacaaaggatcactcaaagatgagaatttgaactaattttactgaaagacaggatgatgcagctgaatggaaagaacactgcataggggtcagaaggtgtggattttcattctgacatggacatttgctatctgcctgatcttctgcaatattctaaacttaacaaagccttatctatacaatgggaattaatccatttattcatatatattaaagattttcaatgtgccaggcactgtgttaaacttccagatggcagtgagaaacaaactctagaatttctgagtcatgataaagatgaaacaggtgttatattttaaaactcgaaatgtcataacagtgtaaggtactatgcattcctaaagcaacataaaacaatagggatttttccaaccttaaagagcagcatttaaaattgagtcttgccttgggagcctgtgacccacgggagcattggaaatgacatcaaccacgaagtcttttttcttccagtgaaatgcaaaacctgctacctccctggagctattagcttggccaaatagtcctctagttagtaagtggacaaagtagttactgcacggctaactgcaactcttcatttaaatatttccctcatgtccagataggatatgtctaatatcatatgcctaatagcttttcagcatctttccacacagaaagaaagggaaataagccttgtcatagccatgaagtgtccccaccaccagagtttcttctctgctacccctatgctgcctaggaatgctaaaactattttatggggccaccaggtggcagttagggcaaatggttttagtttttttctttctacattcttggggaagaccaggggcttaggaatggagaagcaagccttggaaataaaagcattatggagcatttgggggtgccaggccctgtgctatatgtgatatatgcaatacctcacccaatccttatatcaatatctgttaaatatactattgaacaggtgaagatagagtaatatgggaaataaaacatcttccgtaataagcagctagaaagtaccacaatgtaaattcaactgcagaagacatgacaccacagggaaatttcgtttcactgcagcagtgtctaaaaactgaagatggggaaagtgtagagtgtgttattaaaatgattttttcaaaaggttttaagagtctaaataaattgcataattagtcagtttcctwcctcctagtcttcctacctttagtctttatttttagctctcctgagtttgtagttgttctccttccatggtttgattctctccttagctttcagattctatacatttcacttctctttataaataatttttaaaaattcttcatgtgaacctgttcaagaacctgttgcattgaggactgaagatatggctctagattccttactgtttccggtagagaatctgcagagagaatatttcactgaagcaaaattataaatggaacatttgactttatatttccatgtccccaaagatttactaaacattagatctgatttggccaactttttctaccaatatttccggctcttgatatgaaactagttaaagctattttttcccttcaatcagcacattttcaaacttagaacatctattactcaaatttggcataaaattatgcagccagctcattatccactttctgcatattgccaagggctcgctacgtatgtgtgttctggttggcagacattttgggtaactactattctcaatttgtacctactttatttcaatacatgtttcaagatgagtgttaaagggtacattgctttaggaaacttgtctttttctggcatttgaacttgcctaaattagaaaaaaaaattctggttcyagtcctttttttctaaaaaaatattccaaatcattagatgaaactgttaaagataacgtttggaaagtttgtctcctcttyggtgattaaaaagtgctttccatttttggcccatggctcttttcctggggcatagcatttgattataaagcttttctgatgaaagtatcacaggayagcaaacatgagaatgggagaaataattttgcatgcaattttttgtcatctggctgcactgtatgggaaatacattttccctgtcaaaatgtcaagttgttttgacttcacaacaaaagaggaaggaagttcttaaatgtagaacaataactcagctcactgctgatttctatttgttctatccttacatcacagtatagagatagaatgtgtcctacaaatgtccatgcagcaactcatattcacttggcataattttgtttattgtttgagaaagtagtattttgggtaaaaattctgaaacaggcagtgagtatgtctgagtatttctggcaagggctatttcttcctttctccttttactctggagttttcttgaactgagctgtttggacaaatgacacatatttcaagaattccaactgtgggagtgtttcactcacaggattktgctttcttctaagagccaggtctggtgaacactctcaggagctttgtaacatgttccaagctatgcagaagtgcttagttcattcactagtcaaagactaacacatttacagcaataaaatgcattataagcattctttcttcatgaatctattcatcccattaaaaaagcaggaattccaattaagtgaggtaaaatatgctaagtagtacagtataagatttttaaaaattacaccatgtttttcatggattattttaagaaaaaaactattttaagaaaaaactgtcctatttttggaaggtctagtcccaaactgcacaggaaagttagaggtaaactgttaaagtctttgagaactggcatttttcaagccrcagtgaatgaaatcaagcattyctctgtttctcctttcctttcggaatttcttttcctgaggcttgagaaggcaatactggtcttacttttcacatgagtyaagtttatactagctgagcaccctgaatcattaacgtctttctccccaggggagaccaagctcaaatccatcatcagaatacatacttagaccctctcccttctttctggccccctgcttcttaggaatgtgctctaaccaccacagcattcctgatcaccacctccagatgacaaaaagaaaaaatgagtggcagtgaaccagaagagcttaggccatctattttatcctaaaatctgttcagaaatacgaggtttgtatcaattagtaagcacactgggaatacaggtatacaagttgttagcaatatttggttatataatgtctatagatayttattttgctttctctcagatattaagaattatgtctttcctttaacctccatcatttgtttttctactttggtggaagctttttgtttgtwtctttactgcaacagtgaatttatccttggatttctccattatgattggcagtatttatacaataatttcttggtattagttaattgataccttatatttactattttcccccaaagctgagtaaagaatagaatgaaatggcctatacttatcagtgtaaatggatattagaattgctgctcttattccaaaaaatakcactyaaagttcacaaatgaaagttaataactgaattttagtaacaacaacttcaacttaaaaaattccatgtaattaatagctcatgagtcccactgagataggttgaacttcataacttctaaagccttttatgtttctactacttttcagttctaatgttcaatagtagcgtgagtatctggttagtttcagtataaaaaagatgatacccacttgtgatatgattctactttcaatgtcacggtggaatcatttattagttttttaatttaatttttcacatgtgagtgtgatacagaacacctgatttttctacactataggatgtcagttcagtaaatcgattttcctcattagcaactgcttatcaatgactatgctgtatagaaagcaagagtattatactctatttttgatcacagataattgaagtaaatttaattagatccatatgaaagaaataagaactctcacaattgtgacatatatacgtgtctgtgcatatgtcatatcttagtatatgaggtatttgcatgtgcatacttaccaagttaaacgacctcctatcccacaaagttctctttagaaataaacttgagtctcttgtttgtgaaaccaaagagaatttcccgccaaagaaatacctacaaagaagtgtaggtaaagaattcaaatgattgactcaggcttaagatgatttgatagctctttctgcaccaagaaacacagaaaatctcaaagcaggcctgtgccaacttggtataaaaaaagccttcctaaagagtgcattatcttcaatgggaaacgtcgcagtacaccttggcatcaccaggtcaattagtgcaccggaaagatgcatgatatttcctgttggcagccacgaagtgagagaattggacggctactagccctgttgtgtgccaaggcctaaaaatcatgcaaggaggtgaaatgatgcgtgccaagaaaatagcaaccacaggaaacagcaaataatgtaaggttttgtgtctttactctagatgtaaatactcatttaccagggcagctttaaattgacagcttttgggtttgtgaggatattgtgagtcagggttctcctgattgggcaagatgaacgagtgaacaacatcactagggggccggagtagatgagatactcactcattcgtgtgcctgctttagcaccagcagtgtgggaatggggagaaggccaatggtctcaaggcagtttccagctctctggcaaacaagataaggccatggctgtaacagacaccctctgccaggttctaaaatctctctcttatgacctttttaagatctttaaagcaccgtctgcccttggccaacaaaagagaaaaaacagagtcaatgcggaaaacgctgccaagacaacattttcttcttaagatcctaaaagcaccattttccctttgctaacaagacaggagcaataaagagtcaattaggaatatgttgccaagacattggccatataatttctactccagtcggttttgggtttgatgcagtttagaattctctagacacattttttcatttttttttcttactagaacgcagaatgtttttgagagtagaggtggatggcactgctcattagaaatagctgtcctgccccagaacaatcttcaagacaaaggttgcaagactatctttgaccttcctgtccctaaacactccccaaccccaagccaaacacgcgcctaaaagttttcacaccttgccctttactaacagcaatcatatttaggaggaatatattattgttagtcaggaaaytctacctggcttcaggaggtagcttagtgggtatttgctaagtctgatacctttcctttcaacatttagctgagattacctatactaagagcacgaactacaactgtggaaaacagaagaaaggagaatgttctccaaatcaaagtgtgctaaggtcagcttggggcagccaacaattcctggaaggtgacagagataaagttgcagagagggaaatggttgaagacaaatgtctcacgccttaaaatgttgctaaagtaagatggctgtttggatgagtcatcaacaagaacatcacctttgctctcttcctgccacccctgcacttctcaggctactgctcctaaaacctagaactcaggagtgatggaaatagagggcacccatggcaaggaagaaattggagagtaggaaactcagggaagttaatcctgaggaaagtggaaagtgactaaaacattttgagcagagaaaagtcaataaatcaaatatagaaacaagagatgataggaggttctcataacagtccaaatgagaggaccaaaaggcctggagtcacgtcattgcagtaaaatggaagaaaaaacaagagtataaatgaagtgtcaaagatgttaagaaacaggatcttttaaaaaattatttttaattattatgggtacataataagtgtatatatacatggggtacatgtgaaattttgatacatacaatgtataataatcttatcggggcaattggggtgtccatcacctcaggcatttatcatgtcttrtattagaaacagtccaattctcctcttttagctatttgaaaatatacaataaattattgttgagtatcatcactctgttgtgctatcaaatactagatcttattctttctatctaactatgcttttgcacccattaaccatccccaccttctccccatgctggctatccttcctagcctctggaaaccatcattctattatctatctccatgaattcactaggagaaataggatttttgactaatgggtcagaagaagcaaaggaaaggaaaggaaaggaataaagaatgactcaggtttcttgcctaggaaattggttaaaaaaagggtatttttaattaaaaaaggagagttgaataggagactaatttgaaggagaaaatagcctatttttagatgtattaaatttatcaaatttgtgtgctgtatatcagggctcaatcacaattctggcataaatttatatattttatagaacattattaacttgaaagaaatgcatgtattttgttaattgatagaaacaagatcaaagggcatattatattattattccgctttgtaaggaaaaataggttttgcatatttatataaaaagggaaattgaatgtgatatactctggggtattaataataattgtgaattaaattcctttctttagtttatattgctrtctcaaatcttctgatttttctaccttgaatgtaaattttttgtttgtaatatggcactttaaattaaagttgtttttcagctgggcacagtggctcacacctgtaatcctagcactttgggagaccaaggtgggtggattacctgaggtcaggagttcaagaccagcctgaccaatatggtaaactccttctctactaaaaatacaagcaaattagctgagtgtggtggcatgcgcctgcagtctcagcaactcgggaggctgagacagaattgaattcgagaggcggaggctgcagtgagccgagatcataccactgccctccagcctgggcaacagatcaggactccatctcaaaaaaaaaaaaaaattaaattaaagttatttttcttttcttccattacccagactggagtgcagtggcatgatcacagctcactgcagcctcaacctcctgngctcaagtaatcctcccacctcagctttccaagtaactaggactacagatgcacaccaccatgcctggttaatttttgtaatttttgtagagatgaggttttgccatgttgcccaagttggtctcaaactcctgacctcaagtgatcctcccayctcagcctcccaaagtgctgggattacaggtgtgagccactgcactaggccttaaaatttatttttcaaaaacttgatgattcaaatcattgaagatgctcttatgccaaagaaaaggtagttctaggaagttcatggaatcttacaaacacctttacagctcaacagaattgcaaagatgggtagtgttttgttttgttttgtttctctgattgttctacagcttatagatactgaggttacattttatgaaacaaaagtaagaatacatgatttaaaagtaagatcaattcctaaaaattggacctgaaaattttatggatagagtagatagacgtgtagaattcatcccagcatagagttgctgggatattactggtgcttcttcacagggaaagaaacctggctacccagactacaaagggaaagggggaaaatggcctataactcatatcaggtgaattagcaaacattctcatttcagacgatttttgctgtccctggtcatgaaatttccttaactgggttctatcttttactttttatcccaggcttttagcaagggtcataggaaaatggccatttccacatatctggtatatcccatttgaagatattgcctaacaaacattactcaggatcccttrcataaaaacctccatgataaatttcttctgtacttttttccccaaaaagctggattctcctgtaaaactgttatctattctctttatatattataattatggaattcattatcatttctactcttatctacatgactaggtcaccaacagctaattatatagctaattcatggtagttaattttatttacttctcttaagtcatgacttacaaaattgcatttctatgtatgccatcttattacctccatttatttaagttgcatactacttcacatttcctttgaagtgtatattattattagtagtagtagtattttggagacagggtctcactctgttgcccakgctggagtgcagtggtgcaattatggctcactgcagcctcaaccttccaggctcaagctgttcacctacttcagcctccccagtagctgggactacaggtgtgtgccaccatgcttggctaattttttaaaaatttcctatttcttgtagagatagagtcttactatattgcctaggctggtcttgaactcctggacacaagcaatcctcccacctcctcctcccaaaatgttatagacgtgagctaccacacccagccatgagtgtacattataaataaataccaataatgtactttcacatatgaaaaggctataaaagtatgcaaatatattatggcaacatctgttaagggataaagtgacacactgttgctcataactcgaaagaatatatatatatatatatatatatatatttttttttttttttcttttgaaacggtgtctcactctgtcaccaggctggagtgcagtggtgcgatctcagatcactgcaacctccgcctcctgggttcaagtgattctcctgcctcagcctcctgagtagctgggactacaggcatgagccaacatgcccagctaattttcatatttttagtagagatagggtttcaccatgttggccaggttggcctcgatctcttgatctcgtgatccacccccccatcagcctcccaaagtgctgggattacaggtgtgagccattgcatccagcctcaraagaatagtataaaccttatgtgttcatataagcagtagaacctatccctaatagttggattttattgtgtaagtgtttcattaaggaatgtctgaaacatgtccagatttttatttcagtggcttagttttgccacagaacttcagttttataaatgtgtgtactggcttaactgtgaaagtattaaaattattgtattgatttttgcttgcaaatgaaattcataaacagaattatcactgaaatttacatgcaagagaaattgatcaagatgatttgaaaacttatggaaagattgaaggttgccaaaatctttctctttctaacttcctacctttatgtacatttacactctaatcacaggtatttacaggccttaattttaacgaaaatgaagaaaaccaagaaagaaacagctctttagagcaatggaaaatcttctatgatttctcactgacattggctagatactctgcatttatgagcaatcatgcatgtatatcatcagatttaaccttcacaacaattccatatatattatcagatttaatcctcataatagtttgctatcctaggttttagtttagaaaactgagcctcccataagctaagaagttacttgtccaatatcacaactttagataatggtagacttagattaaatccatatttgctcgctctacattccatattcttcccatttaattgaacaagattttggaataaagttgaaatccacaaaaggaataggacagtgacttcacaataaaaatattaaatgtggcagaaagtatggatgtcaatggaatgtaaattctgggcctcctcaaaaacttgatatactcatcctgtgttagttgtgaaataaacaggttggagagtgaggaaatgtggtttttgttcccagagtcattactgaccaactgtgtgctttgatattatatttgctttctgatactaattatattaattctcgctcatagaaatcttccctccttcataccccacctctgtttgattcttaatctcatacataagaggtttttattcaatgtctcatttttctttccaggacaagtatgttgtaagaattaattartagtcttagaaccattcaagcagtaggttctaattgagtatttttctccccggttagcacagcaccctgtcagagccctcaaagtcagacaaagaaggatgaaacatgttttggtccttaataaagaactgctgattgactgtttgaaaaacaaatgccgcacacctgtaatcccagtgctttgggaggccaaggcaggaggattgcttgagcctaggagtttgagaccagcctgggcaatatgatgaaacctaatctctacaaaaaaaaaaaaaaaaaaaaaaaaaaaagagccgggcatgaacctgtagtttcagctacttgggagactgaggtgggaggatcgcttgaaccctagaggcagagttacattgagctgagattatgccattgcactctaccctagggtgcaagattctgtctccaaaaaatgaaaaacagctgtatggtttggagagccagtggctgacaaactgaaggtcatggctaacagagtctccatatcagtgaatctcaaacatctgtttacataaatagcatcttcttataaaaaaatacaaattctgagcccccatcccattatagttggtaagtctaggatgagaccagaaggggtcattttaatgagattttcagatgactttgaatttatatttaatatttattctggtttgcctggggttgaagggttccccagggcatgagactttcagtcttaggcaaactggaatagttggtcactcagatttcggtgcagtggttaaagttaacactttcaaaaatattgtagtgatctagatttggttctaggagtttggctcaattcagggctaacaaaaaaatctgtttagggccacttggggattagtgattctcaaaaggtagtccttgaatcacttactgaatacctatagttgaagaacagataactgcattttaacaagattcaaaggcaaattaatgtttgatgaccgttgacatcaagtctcagaatcagaactgttyaacttccaagcaaatgaaattactaaactcacttctctgagtgaggctgagagcaagaagttaagtataatgttttttgagctaaaatacagagtctactatcagaatcctgtttcccaccataaggattaagatttttttgtttttgtgtgtgtatgtgtgtgtgtgtgtgtgaatgtgtgtgtgtgtgtttgttttttgtttttctgaagtgaatgacatcgttttttggaatgaaaaggtcttgccccaccctgcaagtgtatctctgcctttgagacaatttagccctggaatcaaacctgggggggaaaatcaaattatgatattaaagaaaacgctgacaaatttctaaattcctttcctctactccctgctgcatacaacttccttctttctatctataaatactatatctgctctagaaacgtgaaaaataacataaatattgaacagagtgtgaaggaatttaaactttattgatgagtagtagtattacccttctggactgatgcagatgagagcaccataaagacaaagtgagttcttttggtccttaagccaygaattggagtctggatagtagggatggaaatgggttattagatcatcagttcactttcctctccaagcagcaattaaatttgttttctttgtctcagcttactcgttgctcaaaaaaaagaaacatttcagctcctcttcatggggaataagaccaaacatagaacacttttctcttaacatgtgtggtgcttgagaggagaaagaggcaggaaggaaatgcaggagaaatgtgggaatcacagttaacctgaaggattactttggctgtccccttcagctaatgtgaacattctggcagtcagatgcagccctgtgagaaacatctatcagacatcctaagtagatgctccaactgctgtttttcatgtacagctgactccaagatgagtgtgatgctatcacggtgcaggataacagagatgtaccgcgaacccaacactcaagatgggaatgataaaacttcaataacaaaaacaaaaaaacaaaacaagccacactatcctttcagccttcagggatcgcctccttaaactgttttctaaaatctttctgcactttatatcaggtrcaggagaagtagactacatacattatttgttgtctatctttgaaaggatttcattccctctactgcacttaatcattcccttatctgaatattaactcagtgtaaagcttcccaaattttccaagttcttgaaagagagcaaaacatattgcaaagctctatatgtttcctgctagatatatttcgtgaaagacttcattatgtccactttcttttgagtttttgtgttagccctgcattgctataatttccaacatcccctggaacataatgaaaaccagagaattgctttttttttctgggtccattttattacattcttttacatctcttacttaactacttctaatgcctttgctctgaaactttgtgcatttgagggtttttttttccccgtgatttggtggactgcaagggcacacaaaactagcttatttttcctagtcaggcagttttgaatagaaggtgattgtgttttccagagataagtatgtaagtcttttctgctaccggaggaggattctattttagtagtctattaagtagacaataagcrctgagttatgagttgataagtggatctgcttaccacctagaaacatcaattgaaaccacagcttatggtttcttactgcctctttttggtttctcactgagtctttctggttattgttatcatttcgtttttgacttgggcttggactgttcagcttggctgtgttaatttttcagaatcaatgacttttatagttacttccatgagtttttcctcctgcattttatttaagcaattcactaactatttataagaccatctttgaaagcctgagatacatatctaggcaaatatccatggaaaaaataaacactctgcaaatttgcaaacaaatacagcaattgccaaagtagggttatcttttgcaatcagtactgtggtttcagtttgaaaaaataaagctttcttrtcagttttgctccaagggctatctgattcggtgtgtagtcggtgaggaaataaatacaggtataataatctgtgcttgctcaaaaattaaaaaatcctttaggagggggccaggcgtggtggctcatgcctgtaatcccagcaatttgggaagcagaggcagacagtttacctgaggtcaggagttcttgagaccagcctggccaaaatggtgaaaccctgtctctactaaaaatcttagctgggcttggtgacatgcacctatagtcccagctacttgggaggctggggcaggagaatcgcttgaacatggcggagattgcagtgagccaagattgtccagcctggacaatagagactctttctcaaaaagaaaaaaaaaaaaaaacctttaggaaggataaaactcatttcctctatcagcatagtgtcaccatattacagaagtatcaaggtcaagtattaagactactgaggctcaggtgtccttggctgaagggagagagaggataccattcttgcatagtcttcagggcagcagtaatcagcaaactgataggttgcttctgggtctaaacccactgtaatcatttgcttgtagagatgacaaagttatcagttgtacttacatccactttttttgttgtttcagaagcttaccacacttctcccagtttccttttaattagtttgtaattttaaatcattacattaagataagaggtttttattaaatttggtagaactcatggtaggtcctacagaaatcactgaacttggcagccaaaaacagtgaccaggctgaggatgtgcctgaattgaacagggagatgctatttacttcttaacagagacatacttttcacgcagaaacttggcaactggaggagaaaaacacagaggtgaaggggaaagaagactattctggaaattaacaggtttcaattttggttgttcttcaacttgttagctatgtggccagaaataagcctcttaaactctctattccttggtttcttcacccactactctaaatctgatgaaacagagcagtaagaatttcttaggatatagcttaatttatttttttttaaaaagctcaatctaaaaacaagcttaatttaaaacagagacaaacaaatatgcctaactttgagttttgacaaaaaatgcaaaagtaattcaatggaggaaagatgagctttaaaaaaaaaaaagtgatactggagcaattggatatccaaaggcaaaaaaaaaaagtgcctaaattcatttctcacatcttatacagaaattaactcaaaattgattacagacttaaacataaaatgttaagcaataaaactttaggaaacaaacaggagaaaatgatgaggacctaaagctakgtgaagaacttctagacttgatactaaaagtatgattttcattttaaatgaattttaaaatgaatttcaatgaattttaaaattcattttaatcaactgggacctcatcaaaattaaaacttttgttctgtaagagaccctgtgtaaagaattaaaagaaamactacagagcaggagaaaacatttgccaaccacatattcaagaaagattttgtacctagagagtataaagaactctcaaaactccacagtaaaatccaaacgatccaattaggaaaatgggcaagaaacataaacagaaattttaccaaagatgatatacagatggaaaataagcacatgaaaagatgttcaatatcattagccattaggaatatgcaaattaaamcaatgagatagcactatctacctatcaggatggctaaagtaaaaaagagtaataataccaattgctggagaggatgtggagaaactggatcactcatacattgttgatggaaatgtaaaatggtacactctgtaaacaatttgcttgcttcttataaaactaaacatgtatttaccatatgattcagcagttgtgctcttggacatttatcccagagaagtaaaaacttagactcagtaaaaacctgtacatgaatattaatagctgttttatttgtaaaagccccaaactggaaacaacccaaatatccttagatcagtgactggttaaacaaactgtagcacagctatactatgacatactatgaagcaataaaaaaggaatgagctattgatacagacaaaaccatggatgaatttcaagggaattgtgctaactaaaaataagccaatcacaaaagatttcatgtgatgtgattttatttatataatattcttgaaatgacaaaaatatagaaatggagaacagattagtagtttccaggggtcagagagtagaggagggagggaggtgtgtgtgtccataaaaacgttgcgccagggatcctggtgaggaagctrttctgtatcctcattgctggtgttcacgtgaatctacatatgtgataacatttgatggaaccaaatacacmcacaaacacacacatacacatatgagtgcatataagaccagagaaacttattttggtggattccgtaaatgtcaaatctttggttatgatattgaagtgtagtttggcaagatgttactattggggaaaatagtaacattgtactattgtcctgtgaattattgattcacaggaaattgtaaaaaaaaatgctttgtcctatacatttttttagaatttcctgtcaatccataattatttcaagataaaaaaagttttgtaaaggaagaattttkgagactctttcagattttttattttgagatttaatcwattatatgagaaaaataagctttaactgaccactctttccttcctatccaaagcttagtcaatgagaaaatgttgcaagagaaggagaatggggggtacctgagactccaggagagtacataccctttttaaaaaagcaatacaagccagcagaaaaaggaargatgggactctggagcgattatgtgaatctgtggttctcaaagttcagcatgcatcagattcccagagggcttgtttaaacaaaaatttctgccctgcaaccacagagtttctgattcactaggtctgggggtggtgggtgtggttcaagaatctgcatttctagaaagttcccatgtgatgttgactccagtgctgatgctgctggtcaraccacactctggaaactactgccatagaacatctgagagtcacaatttgaaactgtctcaagaaatttctaagtaaaatgcaatgcaataaattacttaagaattctctatatttacaactctttatttgwatagtttccttccccctcagtatgttggctggtaagaatgttctttttgattattcatctgtgtgggctcaagagtgtgtcactgagttaatttacaaagcctcggattgcatatccatcacatttgtagaaagtattatcccagaaaaatccatcaacacaacacataagctccaaaatgtactgcacaattggcgtgcaatagagtagtcaaagaaccaatgaaatgyaaaaagttatctatatggagatctcaaaatgaattaacaaattaaatcctttgacattgtatgagatcccattagggttcattgttacagttttctttaatgtttctaaaatagaaatgttgtcctgggcagagcagtgtaatgtacttgctttggcatcaaatgccacattttttttttttttgagacggcgtcttgctctgtcacctaggctggagtgagtgtgcagtggtgcaatcgtagctcactgtagcctcgaactcctgggcttaagcaatcctcccacctcagcmtcctgagtagctgggactacaggtcccagstgcccagctatttttaaaattttttgtagagacaagtcttgctatgttgcccwggctgatcttaaactcctagcctcaagaaatccttcagacttgtcctcctagagtgttgggattacaggtgtgagcctccacaccaggcattgtttctattttaactttgctacttacgagaagtcttaatttgaccaacaactaatgtaagctctagtttccccatatgtaaaaagaagataatgcctaaattgcagggtttattgggagaattaataagaacacgcctaggccaggcacaatggctcatgcctgtaatcccagcactttgggaggccaaggcagctggatcatgaggtcaggagttcgagaccaccctgaccaacgtggtgaaaccctgtctctactaaaaatacaaaaattaggggagtgtggtggtgggcgcctataatcccasctactcaggaggcttaggcaggagaatcacttgaacccgggaggcggaggttgcagtgagccgagatcgtgcaattgcactccagacttggcaacagagcaagactccatctcaaaaagaaaaaagaaaaagaaaaataagaacacgtctaaaataattagtgcagtgtctgacacttaagttctcaaatagtggcggtgaagatgtgaaggagggtagagatgactgtgattattaatcatcttatttgttgatcatattaaaatgacaaaaaccacaattattttgcaccaacctaatatttcagcagatgtcctctgaatcagaagtaaatagccatgataatcttaccattagttattttattgagcaattacaagtcccaggctcttacgtttttatattaattttttacaaccagtttatgcgatgcatactgtcctcatttatcatataaggaaactaaaacttaaagagtttaatatattgctcaaggttatccagtgtattggtttgctagggctctgtaacaaagtaccacaaaccaggtggctcaaacaacagaaatgcattgtttcacagttctggcgtcaaaaagtccaaaatcacagtgttggcagctttggttccttctgagggctgcaagggaaagattgttctgggtmcttctccttggcttgtagatgtctgtcttctccctgtgtctctccatgtcattttttcctctatgcatgtctgtctctgtgtccaaatttttccattttaaaaggacattagtcattgctgggcacaatggctcacacctgcaatcccagcactttgggaggctgagagaggcagatcacttgaggccaggagttcgagaygagcctggccaacatggtgaaacgtgtctctgcaaaataatacaaaaattagctaggtatggtggtgcatgcctatagttccagctatttctactcaggaggctgaggcatgagaattgcttgaacccaggaggcagacgttgcagtgagctgagatcatgccactgcactccaacctgggtgacagagtaagactctgtctcaaaagaaaaaaaaaaaaaaagggcattagtcattggattasggcccaccctatggaactcattttaacttgatgagctctgtaaagaccctatctctaaattatatcacattctgaggtgctgggaggtaacactccaacttatctttattgaggggggcagaattcaaatccatagcacatagtagtaagatgtcatgctgaggtatgaaccagacttcatacgcaatgctgtggactaaacttttgtatgcctgtgaaattcatatcttgaaggcctaatctctactgtgacggtgtttgagatggggcgtctgtgaggctttaataggtttagatgaggtcaggagagtgaagtgcttgtgttggaattagcacccttataagaagaaaaaaaggccaaagcctcctctctctctgccacctgaaaatgcaacagggaatggccatccacatgccaagaaatgggcccttatcatacaccaagtcttcctgcacattgatcctcgatttctcaggttttggaactgcaggaaatcgacgttcattgtttaagccacrcagtctatggtattttgttatagctgcctgagctgactaagacaggcaatatatgacatggccgtttgctccaggacttttaggaaatgtggatcccattggtagtgctcagcaatcaaatttatttgatcctcatgttcagcagacatgttgtttttttcttcatgtattgccaactcttttatatgatacataaaacatattgaaaaacgtagacttgctatctttatattccacatgttggcagattctttccaagaaaagtgattttcagatcattccttaggagcgttgaggctgagaagtggtctttgcatatttatatttagaaattatcgagtccaaaatctaaatattgagtcttggtagaagagaaaaccagtcacaatttatgtaaaatagttgttcctaggtaatgaaccaaagcagggactatatttgagaagtagaatggtattgtcaaagtcagtgtacaatcaggaaattaaagagattattttatccaaactattgcagttaatgaggaatgtctcaaaagaaagggaagcagggttttatagatataggggaacaaaaagtttaagggatttcttaaccaccacttttttctagaagcatagggattaggtcacattcaacattttcagtccccacttctacttcagatcaataaacattataggatgctgaacaacatagaggtgatcatcagaaacctgagtaagactgagcagggtctaagaaatagtctctcaagagttcttgttggcattattgtcgtaacatcacctaaaccagctgttgagaagtagtggcaaaggccagttgtttcaaagtcatagagatcaggctccttaaaagagaagtatttaaaatgaaaaacattaatatcaaagattatgttaaagaccagagtttaaccctgagcataccagtccagcaaattccaaaaggtgggtggggaaaatctttcagttacacagtaccrttcgttgagtttcttgaagctaggatgtcaatgttcttgatgatgttcagtctcggttagctttcctctaagagaatgaaggacctgagcttttcaccagaatttgttaggggctcagacagtggtttgtgcagggaaaagtctggcctgcgtgtaatctgctgcagtggtgagttcttcaaagtttgaatcaagtagttggacttcagctggcagaatttcttcaactcctggagaaaagagctagctgctagacaacctagagttccaacaggaatctgggcaatcagatgttatttttcagtgacatcaagttagggaaagagagaaaaattggaaacattaatttgtagggttgtagccagatattgaagcaaactggaaggcttcacagtttggtacaaattaacaatttgggcaagataacaggatccagttcaatttttaggaaggtgtccaaactgctttttccacaraggaggggaagtcatttaaatcattccagacaagtcagaatttgcatatgtatcagttacctgcaatttatgaaactgtataatatggctaagagataattatgtctacaatctgataaacaggaaggagctgcttgctatagttttccactgaaacaaaacatttctctctatagtcacccctcttttgatcaaaaataatctcaaagaaagattattcttgatcacaaaataaagctagtaccatcagatttggcctgattatttacatkgttgtcttaaagatgataattcactacatagggtttcttatatttgctttgctgaaagttttcataaggaatctcaaattgaatttttaaaaaccacttgaggctaggaagctatatcaagaactcaccaacagatttacctacagtatctataaatttcrgtaaatgcctctcttttagaggtcccaaaaatatctcaagttttctgagcctgcgaggaagtatcctttacctgtaaatttgggcacctcattagccagraatcaggctgrttttcccaagagggctttaaatgagcatacctaatgtttccaatatttcatgcaaacaaggaagagttttattgaacctatgcaaataactataattttgaaatataatgagaatactcagtaagaatttctgatttctctaacagtcaggcaggaagaaaaagataccaatgacaaatgtttcatttatatttgcaaagcatagacttctgaattrttatgagtttcagttagtttaagagaaaatagaaakaagtttcctatgtccaaaaaatcaaccattaaaatatcagcaatattccaaacaaaagctacagtcattcctcatcagttccttcagtcctgtgtaattcttgctctgcttcctcttggcttaacagtttcatgcatacatctgcctctccaaacagggctctggaaatcctgactcagtctgctggtatggtctcaaggttgtgtaagtgacggcatcagaagcttctgccccaaatgaaaagtacctggcatagagctttgccatggggctctgagataatcctttgttragacaaagcactacagctagatttgtaagagctttcagggaagcaccacaaagcaaaattctatttgtaaatgacaaaagccttaaaaattactttgaaaaatcattttcaaacgtgaaagatgtaaggagtgtttatcacaagaatctccatttgaaaaatactggcttataggcacagaaaaacaaagatagtatgttctcacttacatgaggaatcttaaaataatcacactcgaagcagatagaatggcggttacaggggatgggggtggagggaatggggaggtgatggtcaaaggctataaaatctttattaggaggaatctgtttttgttttttgagttctagtgtacagtgtggtaagtgtagttaataataaagtgttgtacatttcaaaattgggaagagtaaatttcaaatgttctcacacaacaaaatgactagtatttgaagtgatgtcgttaactggctcaatttaattattccacatggtaggcataaatcatattatcactttgtaccccatatacttacaatatcataaattgtcaatttacagtttttttttaaaaaaaaggaaagcactggcttagaakaagctaatttgaaattaacgaataaaagttgttaccaagttaacattttaaaaataactgaaacttatgactcatgtggtgctctctaataacagggcaaagtgacatcgggactcaaagaaaaacacgttatggacataaaagcctttgatgactctctaggaattttccatacagcatacaatttctgaaatatttatactgataacattctgcccatacagatttgtcctagggaaggttaagcatctcttctgagtwggcaatgactcccgtgcaatttgtaaatagtaacatatcaaataaacctaattcttttcagcaactttcttttcataaggtgaaataacaaatcctttgtgattttcaaaggccctctgggagatatcaaagacagtttcagatgcaatagatatcacttaggaatcagttttgggagggaaaatatcaaaagttgtcaggagattgggacactttactaggatacggtcgtgagttactgataaacaatactttgctaccttaactaaggtgacagcaaaaagagtgaaaaagtaagcacaggcagtaacatgattgtaaagaatcttagctttttcaaaagggagaagactttattaaataagcaaggacgtgataaactcaatacacaatataggaagttattttaagacatgkaatctttgccttctaggcagattactcagaaggtaaagaaaaaatattattaagagtagactaagaagtyaagaaaatgttatgtttttaaacagaggcaaaattaaattctactttgcatcattatggcatttgatattaaagatctttttgaaatcttataaatgaattcatcaagccttagctagcactgaccacagcaaagtttgtttcccacaagcgttttacaactttctacgtctattcagcttttgtcctacacattaacaactagctatatgacttcagaataaaatgactctatttttttcttaacaaaaacatgttctgcaaaccttgcatacaaaattgtatctctctgctattattatgccttgtagaatctcattcatgtatattgattataatttttaaatagaaatagtaacatctgttgcacaaagaaaaaagggaaatggataattgtgatctttctgtcatacataagctttttgtaacacactagtggaactcatgaatacacatctcacaacttttaatagccatgcatattatttacagcacgacttatgcaaagtggcaaaaatgaacacatttattaacaaaactgaatgtacatgcttctctatagcatatagaaacaaaaggcaaaaaagtatataaacttaaaattatgcttggttaccaatatttcacttttctctcttgcatagaaattacataaatatccaattaatattcattaattaattcaatttagcttcaatccaaggttttaaattaccaaatatcttggaatttgtcttcaggctgacatgctccaaaatattagtaccattgaaagtttgttagaataatgactcaatttgcttaaacacaaatttttattttctattgtattaaacattaagtagaagtaatgctaggttatttggttggtaaatctaagtttaggaagaacattcacaagtagaatagaagcatacttgtgttatatttaacactaaaaactcagagaaaacagctatttttactaaatcaacctcattaattgattatcaaaataataattattgttaaatattgtttgccaaacatttacctagattttgtgaacttgaattattgtctctgagttatgttcctacaagakacagctttttcccctacagtaaaagtgtttaaggctcaatttcctcaacttctgggaatttgggaaatatttggtttatataaatggttatttatttctaagccaattagaatagagctcctttaagagattctataacctaatttagcgacaccatcctgaggtagggaaatattttatttttatttttttcagagatgggctagattagaactcctgccttcagcctcctgagtagctaaggttgcaacttccatagtagctgaaattgtrggtgcatgccaccrtatctggccaacagggaaatattacatactctaacaatgagtggtgacwtcctttctgaattacagacatgtagacattaaagcagagatagcaagaatttagtttccattctaacatttaagccatgggtcaagagtggacacagaatcacaaaacttactgtttcatatcaaagagctgttctgttctcatgattcttaagtgatttgagctcaaaacagacaaacagaaaagcgtagcaaaccaaattctctgttgtctttcacccataagatacaagatctctaaaagtcattaatcccctctcagagatcaccaagtggtcagaccacaaaaccaaagccagtgccagaaatcaagtgagtactaaaaccttgccttgctaccaatagacaagggtccatatcacaggaccaggagttagacttattcatagttccttggaccaggaatggagcacaaagggcccaaataagccttattacctgtgttgagtaaacaaagatcccagtgcaggagatccatatcatggcaccaaactatcaaatacaggatgcactaggtcattaaagagaagattttattcaaagcattgcaaaatggagaacattgatttatggtgaatatcttgaagaaaaggaagggggtctggggttctatagrggcaagaaaaaacgggagtcatccagaagtcttataaaagtcatgaagaagggtggagatgggtcttatctcagaatatgggaaggcagtttgggcctttgcattagttgtttgccagacactaaagggtagagaggtttcttaatcattactcttttccrgaagcacagggctcaggtaagattgaatatttttcatgcctttcatcctctctgtctgatctctttcaaacygtcttttttgttgaggctatatgaaatgtttactgttttaccttccaatcaactccataaaaacggttgatataaagcatctagccaagttccactacattttagtcattcattatggaacatcatcccaaggaaggctttattctctctgtctaagcaagcaatgaagggagatcttttggaaatggcctagtatttgatgagaagcaagaacaaggtctacattagtggatcacagactttttgccactgagatccaccatcgaaaatgcattcattattacctctgcatgtgtttatttaactgcaacaatagtttaatgattttcataacacaaaacttcacagtgtatgatgacactgataccttctagtctattcccagctgttctatttcatttttttatagcttatagtgactcattaaaatggatttccacgaatgcaatgcaacacacagtttgaagtccactggaaaatcttttaaaactgttattataaaatgaatttagtaaccttttcaaaattttactagtrtagtttctgtggtttttaagaatacaaatattttgccttctggtcttttttttcacacaagtatatggcagattcctataaatattttaatagatcagcagtttccaatgccatgtttcggtgatgatattttaccagagatagtctgtaatgaaaaattgagacaaatgatgacaatgtaatttgcagacatgtatacttatttataataaatttgtagacatgtatatttagttagttattcaacaaatattcagtgccttttatatcttaagaatggttcatgwtaattggaggcaaacaagaaaggcaaagttactgcttagttgaaatttacattctagtataaaaattgccatatttattattattattattattatacttaaagttctgggatacatgtgcagaatgtgcaggtttgttacataggcatacgcttgccatggtggtttgttgcacccatcaacccatcatctacattaggtatttctcctaatgctatccctccccgctccccccaccccacaacaggccctggtgtgtgatgttcccctccctgtgtccatgtgttctcactgttcaactcccactwatgagtaagaatatgcagtgtttgtttttctgttcctgtgttagtttgctgagaataatagctttcagcttcatccatgtccctgcaaaggacacaaactcaaccttttttatggttgcrtagtattttgtggtgtatatgtggcacattttctttatccattctatcattgatgggcatttgggttggatccaagtctttgctattgtgaatagtgctacaataaacatatgtgtgcatgtgtctttataatagagtgacttataatcctttgggtgtatacccagtaatgggattgctgggtcaaatggtatttctggttctagattcttgaggaatcgccgcactgtcttccacaatggttgaactaatttacactcccaacagtgtaaaagtgttcctatttctccacatcttctctagcatcttgtttcctgatgttttaatgatcgccattcaaaccggcgtgagatggtatctcattgtggttttgagttgcatttctctaatgaccagtgatgatgagttgcgtttctctaatgaccagtgatgatgattttctcatatgtttgttagccgcataatggtcatttctctaatgttagctgcataatgtcatttctctaatgaccagtgatgatgagttgcatttctctaatgaccagtgatgacgattttttcatatgtttgttagccacataaatgtcttcttttgtgaagtatctgctcatgtcctttgcccattttttgatgggattgtttttttcttgtaaatttgtttaggttccttgtagatcctggatattagccctttgtcagatggatagattgcaaaatttttctctcattctgtaggttgcctgttcactctgataatagtttcttttgctgtgcaaaagctctttagtttaattagatcctgttcatcaattttggattttgttgccattgcttttggtgttttaatcatgaagtttttgcccatgcctatgtcctgaatgatactgcgtcagttttcttccagagttttatggttttaggtcttatgtgtaagtctttaatccatcttgagttaatttttgtataaggtgtaaggaagaggtccagtttcagttttttgcatatggctagccagttttcccaacaccatttattaaatagggaatcttttccccattgyttgtttttgtcaggtttgtaaaaaatcagatagttgtagatgtgtggcattatttctgaggcctctgttctgttccattggtctatatatctgttttggtaccagtaccatgctgtttgggttactgtagccttgtagtatagtttgaagtcaggtagcttgttgcctccagctttgttctttttgcctaggattgtcttggctatacaggctctcttttggttccatatgaamtttaaagtagttttatctaattctgtgaagaaagtcaatrgtagcttgatggggatagcattgaatctataaattactttgggcagtatggccattttcatgatattgattcttcctatccatgagcatggaatgtttttccatttgtttgtatcctctcttatttccttgagcagtggtttgtagttctccttgaagacgtccttcacatcccttgtaagttgtattcctagggattttattctctttgtagccattgtgaatgggagttcactcatgatttggctctctgtttttctattattgatgtataggaatgcttgtggtttttaaacattgwttttgtattctgaaactttgctgaaattgcttatcaktttaaggagattttgggctgagaagatggggttttctaaatgtacaatcatgtcatctacaaacagagacaatttgacttcctcttttccaatttgaatatactttatttctttctcttgcctgattgccctggccagaacttccaatacaatgttgaataggagtggtgacagagggcatccttgtcttgtgccagttttcaaatgcttcctgtttttgcctattcagtatgatattgcctggggggttgccataaatgactcttattatttttggatacattccatcaataggtagtttattgagagcttttagcatgaartagcattgaattttatggaaggccttttctgcatctattgagacaatcatgttgtttttgtcattggttctgcttatgtgatggattacgtttattggtttgtgtatgttgaaccagccttgcatcccagggatgaggctgacttgatcgtggtggataagctttttgatgtgctgctggattcagtttgccagtattttattcaggatttttgcatcaatgttcatcagggttattagcctggcattttctttttttgttttgcctctgccaggttttgctatcaggatgatgctggcatcataaaatgagttagggagaagtacctctttttctgtcatttggaatggtttcagaaggaatggtaccagctcctctttgtacctctggtagaaatcggctgtgaatctgtctggtcttgggcttttcgattggtaggctattaattactgcctcartttcagaacttgttattggtctattcagggatttsacttcttcctggtttagtcttgggagggtgtatgtgtctaggagtttatcaatttcttctagattttctagtttatttgcgtagaggtgtttatagtattctctgatggtagtttgtatttctgtgggatcagtggtgatatccccttcatcatttttttattgtgtctatttgattcttctctcttttcttctttattagtctggctagtggtctatctattttttaatcttttcaaaaaaccagctcttggattcattgattttttaaagggtttttcatgtctctatctccttccgttctgctctgttcttagttatttcttgccttctgctagcttttgaatttgtttgctcttgcttctctagttcttttaactgtgatgttagggtgtctttcccactttctcctgtgggcatttagtgctataaatttccgtctacacactgctttagctgtgtcccagatattctggtacgctgtgtctttgttctcattggtttcaaagaacttatttatttctgccttcatttcattatttacccagtagtcattcaggagcaggttgttcaggttccatgtagttgtgtggctttgagtgagtttcttcatcctgagttctaatttgattgcactgtggtcaaagagactgttatgatttccattcctttgtgtttgctgaggagtgyttcacttccaattatgtggtcagttttagaataagtgagatgtggtgctgagaagaatgtawattctgttgatttggggtgtagagttctgtagatgtccattaagtctgcttagtccagagctgagttcaatggaatatccttgttaattttctgtcttgttgatctgyctaatgttgacagtcaggtattaaagtccccactattattgtgtgggagtctaagtctctttgtaggtctctaagaacttgctttatgaatctgggtgctcctcatattgggaatctggttgctccttgtatttggatgygtatatatttaggatagttaactcttcttgttgcattgatctctttaccattacataatgcccttctttgtctttatctttattgatttgaagtctgttttatcagagactaggattgcaacctctgctttttcttgctttccatatcttggtaaatattcctccatccctttattttgagcctgtgtgtgtctttgcacgtgagacgtgtctcctgaatacagcacaccaatgggtcttgactctttctccaatctgccagtctgtgtctttaattggggcatttagcccatttacatttaaggttaatattgttatatgtgaatttgatcctgtcattatgatgctagctggttattttgcctgttagttgatgcagtttcttcatagtgtcaatggtccttacaawttggtatgtttttgtggtggctgttaccaktttttcctttccatatttagtgcttccttcaggagctcttgtaaggcagacctggtggtggcaaaacctctcagcatttgtttgtctgtaaaggattctatttctccttcacttatgaagcttagtttggctggatatgtaattctgggttgaaaattcttttctttaagagtgttgaatattggcccccaatctcttctggcttgtagggtttctgcagagaattcctctgttagtcttggactttcttgaagaaatgggcttctctttgtgggcaacttgacctttctctctggctgcccttaacattttttcctttatttcaaccttggtgaatctgacgattgtgtgtcttggggttgctcttcttgaggattatctttatggtgttctctgtatttcctgaatttgaatgttggcctctcttgccaggttggggaagttctcctggataatatcctgaagagtgttttccaacttggttccattctccccgtgactttcaggtacactaatcaaatgtaagtttggtcttttcacgtagtcccatatttcttaggggctttgtttgttccttttcattcttttttctctaatctcgtcttcatgctttatttcattaagttgatcttcagtctctgatagtctttcttctgcctgatctattcagctgtcgatacttgtgtatgcttcgcaaagttctcatgcagtgtttttcagctccatcaggtctttatgttcttctgtaaagtggttattctagtaagcaattcctctaaccttttttcaagtttcttaccttccttgcattgggaggagcttgttattacccaccttctgaagcctaattctgtcaattcatcaaactcattmtccatccagttttgttcccttgctggtgaggagtttgtgatcctttggagragaagaggtgttctggtttttggaattttcaggctttttgcactgatttatcctcatctgtgtggatttatctacctttggtctttgatactggtgacctttggatggggtttttgtgtggatgtcctttttgttgatattgatgctattcctttctgtttgttagttttccttctaacaggcctctctactgcaggtctgcaggagtttgctggaggtccactcgagaccctgtttgtgtctacggccataccaccctgaatgcgcccgatctcgtctgatctcagaagctaagcagggtcgggcctggttatacttggatgggagaccctgtttgcctgggtatcaccagcagaggctgcagaacagcaaagattgttgcctgttccttcctctgaaaactttgtcccagagggacacctgccagatgccagctggagctctcttgtgtgaggtgtctgtcaacccctgctgggaggtttctcccagtcgagagggatggggatcagggagccacttgaggaggcagtctgtcccttagcagaacttgagcactgtgctaggagttctgctgctctcttcagagccggcaggaaggaatgtttaagtctgctgaagctgcacccccagctgccccttcccccgggtgctctgttccagggagatgggagttttatctataaacccctgcctggagctgctgcctttctttcagagatgccctgcccagagaggaggaatctagagaggcaatctgactacagcatctttgctgagctgtggtaggctctgccaagtacgaacttcttggtgctttatttacactgtgaggggaaaactgcctactgaagcctcagtaatggtggacacccctcccctaaccaagctagagtgtcccaggtggacttcagactgctatgctggcagcgagaatttcaagccagtggatcttagcytgctgggctccatgtgggtgggatccgctgagctagatcacttggctccctgactccagccccctttccaggggagtgaacagttctgtctcactggcattccaggtgccactggtatgaaaaaaaactcctgcagctagcttggtgtctgcccatatggtaaccagttttgtgcttcaagccatatttcttttattggaaaatatagaacttttccttctcacattcaacttcttgagaggatctctttgataatgtgttcatgtacacagttcacatcaaatatatataacatgtggatcaaagtgttaagatattcttctttacatatagtgttagtagctgacgatttttttttcttcaaaaataaatttggaaacttgtcagtccataatttttttaagtattattttactatctcatgaaatctgaaaggctagaatacactagataactcttgatttccactcctaccctgccatgaagtgataattcacatctggctataacttcataaaaggggcaggrcgacccacttcctaaaagaccactattgacttgaagacctgtgtctcttgtctcacttctaaaagtgatttaaaactcaataactcactctgaaatccactgtataagaaatagtaatgtttagggtcatttaaaagaaagattagtttaataaattttggcaccctgtttaacatataaaaccatgaccatgtgttaagtataaccatattttgtgcagaatgtgattcaaaagactgatttaatagctatagtccaagaagtgttgaaaactcttgcccagtttatggtttccaatataggacacatatcaacagaataagaaactcaagaattaaactgatgactgtgtcgacctctggaggaactcttttttaagacacaaagccaaattttcaccttcatttatgcacactcatctyctgaaggcttmcttatgcatttacgtgtgaaggaaggagaggatttgactcagtctctttgtctgtcatctttcttcctctctcattctgaaatagcttttcacagttgaggaaaaaataaagatttgaccttcccacagtgaatgataacaatgataacagctgatctttatatagtgtttattatatgacagagatcatttcatgcactttgcttctaagaactcatttattccttacaacactgtaagtactgttatccccattgcacagacaagaaaaatgagcttctgtattagtccattttcacactgctataaagaacttcctaagactgggtaatgtatagaggaaagaggtttaattgactcacagttctgcatggctagggaggcctcaggaaacgtacagttatgtggaagaggaagcaggcatatcttacatggtggcaggtgagagagagagagagtgtgtgaaggaggaactgtcaaacacttataaaaccatcagatctcgtgagaactcactcactatcacaaggttttttgcacagacaaaaccacccccatgatccaatcacctcccactaggtccctctctccacacatggggattatggggattacaattcgagatgagatttggatgtgggcacagccaaaacatatcaggtacaaacaaatagtggagttaaaaatcaaacatggaccatctgcctctgtagtccaggcccttaaccactacattatataacctcttgagagaggaaaacttagattgggcaatattagcatccaattgccagtgcaaaaggaaatggaagtcagcacaccagcttattacttacccgagatcaataagagacctgcaaatacttgactccgggttatagacttggtaaatccaaatgatttctctcatgaatccgaatccctgccagtaatgcagatattctaacttgagacttaccttccagactgaaaatgccaaatgagaaaaaccaagtaagtttgagtttctgcagttacaaagtgctatggtttgaatgtccctatcaaaactcaggttgaaataaaattgccattgtaatggtattaggagatggggcctttaacaggcgattaggccatgagggctctgccttcataaatacattaatgtcattattgcaggagtgggttagttatcacaggagtgggttagttattgtgggagagggttcctgataaaagcataaatttcacccccgtccactccatcttcagtgctcacttcatccttccaccttctgccatgggatcaccatccccagatgccagcatgatgttcttggacttcccagccccagaaccatgagccaaataacttctcttctttataaattgcccagttgatggtattctgttatagcagcagaaaacagacaagacataaaggaagacacataattaccctcccccaacagttcatgttacccctcaacattgttttagtcagtgcaagactaccaaagtataggtgtctgaacatcagggaaatgtaaatagagaaggtaaatgaattcaaccttccttttccctatactctcatttctgtcaaatataaaaacctgtgggttttacccttgttccagtttacataatcacattccaaattacttatgtggacttttatgagggctttttttctttacacctctctccttttctcatcagcctctgcaatcagctttatacaagagttatatttcattcatttcattttcttttctttctatttcacaagttctgggacttggctgtcaaccgaatcttgaacttggtaattaaattgttcataagctccaaacatgttgtaactcatgtcatattcatgtacacttctctgccccaacttgataaaatgagtgatactgggacaccattgtcatacacacctccaaacctgggtgtgtccacttcaaatgcctgaacttgctcaaatagaaatgggattactaaaacaactatatatcctcaccatgctggttttagtaggaaagatgcatcaaggataaagctctccagtgaaaagcatggggctgaaagaaggaagtctctctgaggcagaagtcctttggaaaaactgaagatgacgtcctagataattttgaagtcttatgtagcaacagaagtttatgtcattaatttagcaaatagtcatagacaaaacatgcaactttagagcaagtgccaggctgtgccaataattccacccttcacctccacatggggtcagtccatagaacaaaataccaaaggccttagtgctcaggtcttttgctcctgacattctcccttcatcctttccctatccccacttatccttttttaatgcactatagatgagtatgtcttaatttcttaagttaatttgcattggcattaagcacctactttatttatttcctttctcaacaactctcagactttgattcttcatgtccttccagggccctgccccatgccttctgctaaatgctaaagtcatgcaacagtttagtactgcgtagagtaggatggctagcaaaaggaaatctctcaaaggagcttcatgctctctgtgactcagggtagcagtatatggccttcggcacccactgtgggctgggctatggcagactttgcttgccctcattgctctctttgctttccttgatcttgcccctgtctgtcttcattttctcccttctcacttttttccctattgttacttacagtttaagttatggaagaaaaacacttaatgcttattggccactggaggatacacctcataacttggaaaatgaaaataaacactttaatagttttgtacttgatatgatgactcttttaaacaaaacactttttatctaggcatgaccttagatttatgggaaaagaaagttgcaaagatagtacagagagttcctgtatacctgtcttctagcttatgctaatgtggaaaacttacataagtgtggcacagttgtccaaaaaataaattcacattggtataattctattcactcaaattcagactttactcatatttcatcagttttttcattattatcctttttcttttcccagatctaattcagaataacacgtgtgttactacatgatgatttaaaatgtttacaaaaacaagacctctacctatgctcctattagtgtgtgtgtgtgtgtgtgtgtgtgtgtgtgctggtgtgtgtatatctttatttaataataaaactagaagggcaatgaattcgaaacggaggcttttcttactagcctttttaagatagacattgctgacacatggacagggattgaattagtacaaatattaaatatcattaagccttcttttttgagttctgtctgcacatcaacttcacctgaagaatgtttgtaaaatacacatgcttgttccccacccaaaatctattgaatcagaatctctagggagtgaggaccaacagttgygcttttaacacctccactccccccttgtattggacggtaaaggccagaaaagattaccttaggcattctcatttcagaagctaaaacagacattcaattttctataccctaatttgggacttatatctgagtgttaatatatgcatgtaatactttgtgatgaatgttaaatgtgttttaatagtgttcccttgcagaatattctttcctttgccggtattattaagactatcttgcattgggattcatgcccccaggcttacagttctctgagctatacttgcatacactgtcctcagtgaacctgggctttggatccagatcgccttgaattcaaaccctagatctgccacttaaagactcaagaaacttacataacctttttgtaattgttctctatctataataaatgaaaagtattactaattattacttacatgcaagattgttgtgagcgtaaaccacatgatgtgtggaaggtttggggcacagcattctttaccaattcagggtaaccctgaaaacttaggaaaaagagaggattcatataaatcacaaattttgcaaatgcattttaaatcctctctttgttccagctccttgtacagacaggactgcttgctactaagaatttccaacacaacctccaattaaatagttctttgatgtatagtgggtacagaagaagtccaacttatttgcatttgcagaatcaggagacccccccaaaaaatgctggaggtgtgaaagcaagaatcagaatttgtcaggattctccgtaaagtactagcggttttgtagatgctttgcagctgtggaactataaacactcaaccgcagacacctcattttatatctcttctatgtggtatatttcccttgtgaaaatgtgtatttttaaaattcactctgcaaaatgacagtcaatgttatcaaatatacatttatatgcccttgattgtaaaacccactacaaagtttattaccttaagtttaatagaaaacaattttgaaaaatgggaaaaaaatatatctgtcacagggaagtggttagaggttctaacagaggagatttcttgttagaataatttgttgtattttggttatacattttttgtttttctttcgaatgttgaaaaagttaagaatatattaatacatggacaggttagaaaatatgtaaataataggttggtcaaatcctgcagatgacaaatcatgagagtttgccaagctaaggggccctggccactcataccatccctttatctaactcttcctcctcatccagtcccataataaaaaatattaagcttgcacgtggtaccttctcttctaggctacttgttaatgggtcctcttaattggctatgtataaaataagattcccatgggcagaaatctttatctgatctgttcatggacatatccaagtgtcaactagattttggcacacagtagatgtttggtaaatatgtattgaatgaatgacagacactgtgctccacattgtaaacacatcatatcatttaatcattataacatccctatgctatcccctatgtgctattattagctccatggtacagacaataatcaggatagatcaggaaactaaccaaggttacacggacagtacctagatggcaggaggccccaaagcatgtgtactaagcattatggcacactgccttcctgtctggcattcttgggacatgcatgtgtgagcgataaggtaagtccaggaaagcgtggggcactgggagaatgtagaagtagggatgatggaatttcatttccacagtgagagccccccatcctgctcccattgtcagacccgcactttttgttatctcttttccttctgtcttgctacgtttgctttgtcttcttcctcgatagtttcccaaagactttaaacgactaactatcaaagaagagaatatatgtgaagtcactagttacttttctgctcaattagctatatatagattaactttttaaaaaaatattttccccatacacccactcacataactgtgaagcttaggaaaaatttcaagattatcgtgggtgggccccatataaatccccacactgtcaattctcccagcagctgtttcttaattcgtcatcagtgtagaaatctaaatcagcactcagtgaaatctaaaagtccaaaagatttatttcaaatttcaaacctcctccctaatgttctgaggctgtgtcaacacaggtagagagacggggagagctgagggtatttaagaatcacataatgtgagaaactgaggagaccctagggatcttttagccctaccccctcatttacacataaggaaatgggatctgaggccaacagcaaacttgcctgcctgctatctgggaagttctattaataacacactgtcatgggggaaaaaattcatacaggtaataaaggtttgttattttcaaagattaacattctttattaattaccacttttttgaaactgacacagccacaaaaaactcctgtataagaagaatttgtctaataaattgtatgattgtttattgggtatctgtttattttcttaatttttaattgtctgtcaatccttcttgatttaaagtagtcacataaatatataaatgtaaagagttaatataactaattgaattcatttgagggaaaaaaattaaattttctttttaaaaaaagaaagaaaacattaaagacagaggtaacattagcacaaaaaaatgtgtataatcaaagtctagagggaggcctaaatgtaaatcaagctttctagtaagcaaaaacaaaagagaaaacctggttaactccaaggttcagaattgctgtgatatgcagacaaaccagctgtgaagacactgcacaacagtctatgataaaaagacgggagggacatttcttgtttgtatagcaaaggtctacaatttgcaatgcactgtggtaaaacagaaaccataagctgaatgcttttgtcactgaacttatattttagttagaaaagacataagaaactaattgtggcatttaacttataatttagttagaaaagactaaaaaagctaactgtggcatgaatgagaaagaaattactgctctattagtggttccaatactgtgaggccacaggaaaaaaaaaaaggattctgaaagatacggtttggaaagacttcgtggaggaagtggcatatcaacagggacttgaaggctgcctagatatgcaaagaaaaagttcaacggaaatacaggatgaaagaattgggtggtcaaaggaacaaacccacttgctgatagattgtcaaaaagtatagtgtctgcactactatgtgacgatgacattttttttccctttgtcatctaaaattgctatcaggccgggtgcagtgactcacgcctgtaatccaagcactgtgggaggccaaggcaggaggattgcttgtgtccaggagtttaagacaacctggcaaatatggtgagacctctctacagaaaaaattttaaattatctaagcatagtggtgtacacctatagtcccagctactcaggaggctcagataggaagatctcttgatcccaggaggtggtggctgcagtgagccaagattgtaccactgcactccagcctgggcaacagagagagaccctatctaaaaaagaattaattaattaaaaaaataatattgctgtcagtaaagactgactagtctgtgtgatatttatcatagctatatttcataactccagtgacctttttaaataaaaagtaaggtccagttgaccctccctgtctgtaggttctgcatacattcaaccaaccatgggtcaaaaatattcagaaaaaaaaatttaaaaatacaataaaaactaatgtaggctgggtgggtgcaatagctcacacctataatccttgcaatttgggaggctgtggctagaggatcacttgagctcaggagttttaggtcagcctggcaacatggtgagaacctgtgtctactaaaagtttaaaaaattagctgggtttggtggcatgcatctgtagacccagctactggggaggctgagatgggaggatcacttgatcctaggaggtggaggctatagtgagccatgattgcaccgctgcactccaacctgggtgacagaatgagaccctgtctttaaaaaaataataaaaataaaaatcaatacaatataacaactatttagatagcatttatgttatattaggtattacaagtaatctagagatgatttaaaatataggaaagaatgtatgtagcttataggcaaatactacgccgttttacatcagggacttgagcatttgcagattttggtatccttggggggtcctggaaccaatactttgaggatactaagagatgattgtccattaaaaatgttttaccataaaggaaacattttatctcttctgtgtcagtctgtgaccttttgggtggaatctgaacaatgtgtaaatgatagtttcccaacagtgtgcgctgatgtgtaggagtagaaaatgatcctttggttttcatataaaaactttcttatgaaacatgaagctaacaaccaagaagattaatcccaccagtgagacacaaggaatgcttaattttggaagtgaagctacttcctcatccctgaggcagcacatacactttttcaataatcctttatttaacaagatccaagaatattaatatctaacagcttagcctaaatttcttgaaaggaccaagcccattgtgttgtctcctgacttgattttcccaaactgtcatggattttctatctaaggaagatgagttccttagttctgggaaaacaccattgaggaaggatgcttcagaagaggaagggatgtcagccagggcagataaaattagcaagaaatattaagattaagtgctatctaagaggtacaaaaaataatagtgtttcacctcaatagaatcttattgttaaaaatacagtgtatctacagttytgaagattatcaaaacacaatattctagccccaaaacaggaaaagaataatgattcttaagaaaaaattctttctgggctgggtagggtggctcatgcctgtcatcccagcactttggaaggctgaggtgggtggatcatgaggtcaggagatcgaaatcatcctggctaacccagtaaaaccacgtctctactaaaaatacaaaaaaaaaaaaaaaaaaaattagccagacgtggtggcacatgcctgtaatcccagctactcaggaggctgaggcaggagaatcacttgaacctgggaggcggaggtggcagtgagccaagattgcgccactgcactccagcctgggtgacagagccagactccatctcaaaaaaagaaagaaagaaaaaaagaaagagagagagaaagagagagaaaggaaggaaggaaggagggaaggaaggaaggaaggagaaagaaggaaggaaggagaaagaaggaaggagaaagaaggaaggaaggagaaagaaggaaggaaggaaggaaggaaaaatattctttccatccattacacactgtaatgtaaaatgatgtgtcccagacaatggtctgtaaaccacattttgtaattccattgtaaaagataatgtagtgcgagcaaggccaaaaatccactattctttggaaaagtgtgccatttaattccactgaagataaggcagttggcacaagtcaacttttccccctggcttagatgtagttgtgcctttcaaaatgagctctctcatttgccaaatacaaagaagagaatagtgttttctcagaggaccacaggatatcaaacataattaaaaataaaagtaagattccctttgaatctagaagaaaactcacccaaatttcttgtaccaaatgaaggtatactgcagattttatcacagtcattaccatgagcagtcaataattccctgaatccctgttggacagaattacatcaggtacatgtgttgtgatgttttctgttttgagttctgtttgttttttatttattggtaattcagataatctcagtttcaggaatttgttttcttctctcctaaaatggagctgatgttcatctcttccttatgttatacctrtatttatgcaccaatttcatagaaaaccatcgtgcattttcccatggaattttgggtgacagtttaagatcagcgtttactataatgggcagacttaaaatggtccccgtgatccctgactcctgaagttcactcccttgtatgcttccccctctttgaatgtcagcggacctttaacctagagaatacagcagagttggccagatatatgtgattccatggttatcttatgtaagattggagtgcatgtcttgctagagtcttttacttccttattgactttgaggcaccaaggggccatattggggaaccccacatggcagcctccaactgagccaccaaagaagtgaattctgccaacaatctgaaggagcctgaaagcacagccttccctggttgagcctcaaatgagactgcagccctagccagtactttgattacagctttatgagatcctaagtaaagaaacaagcataactgagtcaggattcctaagccacataacccgtgagataataaatgtgtgttttaagtggctgtatttgttatacagaaataaaaaatgaacatacttactaaaaaagtttttagctgttgtgagtcctggtaattggatttgttttccagtgatatccatggacactgtgtcaatagtgatgattgatgctgatttgttttactcttatttattcaggatctgggtattaaaaataaattcaaactttcaacaggctgatcacctctgcccctctccctattagcatgtgcatgtgtgtgtgtgtccatgtgtccatacatgagtgaatggatgtgtatttaagcttaatcatgacacagggggttgtttatacagggtttttagaaaacaaaaacattgtctctatgaggcagttccttagaagccaactctcaacagtgtctcagtgtttccctcctgtaatttttccacacattatgcactggattttagtttgtgatactcaggattagtcatgaaaccaagtctttttgtgttctatggtttgaccagccctgtgcaagtctccagggaagcacgaaggacgggtaaatcagagtcccatcccttgaagcatggtggtattagaacatcacttaaagaacagggatacattacccatttagtgaaataatctagaagtcctggaaactaacttagctcacaagatgatattcattagccaatttacttcagaaactttaagaaaatcactttacctcctctgtacattcctccttccctccttccctctcttttcctctctccctccctccttccctcccttctttccttccttccccatattgttattaaatatgctcattattagaatagtatcaaagacactgaggcatttttagatatcttgtgaaatactccttatttttgtctcttcctttagatatcttaattatcaaaataatctaataagactctatttggaaataaagtgaaggagggtaaagttgtgtttttaaataggctgatcagtgctagaaataataggatagttttaaattctagcaattatagatcaaggctccatatactatttctaaaaagtctgtgaacccctgggaattgtgaatgtttcccattacatcctgccaacgattcttattaacctattggtgacgtctttcccagaggtgaagctttgatctgcttgtcatctcacattctgtctcaccacagtctagagcttccaggtccatggggaacaaggatggggcagcagcttccctgtgccaggactgactgggaaattccagaattctatgaccaggtacctgggaagggagaagagctctctgagttacagttagtctgggagcttttgaagtgaaactgtcatagggaaagtgaaggaatttgctttgtgcaatcatcatgccatagtctgacaagacaatggaaaaagaaagaaggaattttctctcaagatgtcaaataattagctgagtcatgaatgcaagcaggtaggcagaaaacagatatttgtagagaacttatttctctttctcctaatgaagtttttgaacaacaacgataaaatggaccttttgcctaagaagcaatttaacaaccattgcttcagtaacacgagaaccaatgtgattagagtgcttgtgctctgtcccctcataaatggttagtattgaggccttataaagaaatataacatctgctttttatacataaatacctacacgtaaccatccacaaataacttacgaatacccataataaacacagaatccatcattatgttaaatgccactgtgattctgagcattttaatatgctgtgaaggcatcagagtaaaacagaaacaagttatatctaaataggaatgcccagtacatttaaagtaatgagacgttttgctaaattcatatgttagcaatatgtcatgtggagtcatgaaggatcagaaataaaaaacagtaattgtccaagccgtcaaggagggatcagaagcaggctttgatcccaggctctgagtagagttgctgtggaattgtagattacatagaatacaggtggcatcaccacagattcctgtttatgtatttaacttgtaacttctcattctgacatcacaggaatatttttccttaacaaagtgaaataaaaagtaaataagctctttaatattgggacataaccaaatcagagggcaacacaaatttacatgggtacttgtgaggcaaaagaaagaaaattcaaaattcacttctaaaaatggacattgtttaaagcacatttaataagtgttacagagtgatgtttcactgtcacctttaaataccccttactgtttctttgggattaccaatttcaacatgaaggtccgagtgaactttgctagaggtgatttgcacaggctcatatgcatctcttcctcatattcagtgacctcacattagcagctttaaattggccatgttgagaacattgacaccacagaaattggcaaaaactagaaatcaagtaacacatgctacaagtctttttttttcttttctcccttcttggaaaattgtaatccagttgttaaatatttatcattataaagtagatccttgttaaaaatattctaatcctcaccaatggttttattttctttctgcctctcttctgctgcccctaaattaaagtaggtctttttatttggggctaagactagttccatcaaaatataaaatagatgaaaagtgttttggggcctttttgccctcttttcctagaccttttctgtttctcctcttgtcaaaatctcacttttttcctttaccttttcagccctgcttcagccctaggtcttcctaaaccagagaattttccaaaaactgcgtgaatatatatgccacaggctgaaatagtcttcccaaaaattagtcattaaaaaagtagagaaagaagatataagttttacatgaaaccctatatagataggagttccttcgagtattttcaaacttgattaacaacagagtaaattatttaagaatgatttaagaaatcaaagtatgagaacttggggctgatccaaagatgtggggattcagagatgaggggcaggcatagaagaggagaagagactgagtatttgtcaccacgtaaattcctgggcgagttgggtaaattttttattataagaaaacactcctttttcttctatataaaatttttttcaagtgagttgctaagttcattgtgagtcatgcattcctttgttcaagtgtggacaaatggtccttattttgttggaattttacactggcagagatcaatggtacaacctggtgaaccccccacaccaaagacacacaggtgtacttaaaggctgatcttctacagtacgcatctatggactggctttggggtgtgttcccaaacactcagagccaccttgagctggggaactggttagtacaagtctctttatgtgtcccttactctacaatcatgcacctagggtcgtgcaaacatcctgaaaccaacccaagctctaggagtcagaaaaggccctgaatgcatcttcaatacaggatctgtgcacacagcatggcctgcttctagaaaaccaatggggctcagaggcagtccagacagaggccttattttaagggctgatagaataggctgtgtttccccaacagcctaccttggtgagtaaacaccaacaattaattcatttatttactcactcaggttagaacattgtgttttcaagtttctaatattaaatttctttttcttttttctggaatagggactatcttattcagctcaaaataccatagactgaggcttaaacaaagacatttgtttcccaccattctggaggctggaagtccaaggtcagggtgccagcctgcatggcgagggttctggtgagaactttcttcttggcttgcagatggcagccttctccctgttcccttacttggcagagagacagagtgagccctggcatcttcctcttcttataaggatgctatattccatcatgggggcccaaccctcatgtgcttatttaaacctaattacttcccaaagaccccacctccaaatatcaacacattgggagttagggcttcaacccatgaattggtagaagggcgggaggtggacacaaacgttccatccataattctagctggtaacatcattgttagaatcagttgccttgccagtctcagaaaacaggacactgagatgcaaagacatgtacatttccatttgaggcaggtgccaggagacaactgagaggacactgagtttagaacattggatcaggcattgagagggaatctgggttgctggatgcaagaggctagtaaggggtgatgagagttcttcacataaatcaacctataactcacccagcctctgtgtcccaggggcctatccattattgatcaaaatgtcagtagaccttttgggttgtgtttcaaagagtaaccattatcttagagattcatagcaaaatatgagtggttcccagtaaaataaatcagagtttcctttatcttagctagaaacacctattgggacttttgtcaaattatttaggggaagaagaaggttgaaagcaaacttccaattgaaaagaagcatatttattgaagttcagagggctggagcgttgttttttgattgacaaaataatgaactctctgataagagtccagaattagttggctgaatttgtattcatttctccataaatttgccaaagttagaagagaaaatccatagaggccaaatgaagaaccatttgattaagcgtgttatcagcctggttgtggccaaattccacctcatatattcatgcacacattctttgctatgagttgcatatgtgctttgtggttgtgggcagatttaggtttgtttttctttctgagtcttttctggtccaaaagctcatcatttaaagttttggaagcaatttagaaagctattagattcccaaccccctcccgacttttggaacacttgcagttatttttttctggcacaaaaacaatcaaaaaggaaaaaaatgtcaggatatcttccaaagagagacataaaggtaacattttatttataccatgatttgtttattcttatttgttgttaccataaaagttatttaatttttttgaactgaaaggcagatgattttaggggataaaaaacctaaaataagaagtgttgctatgtgattacagagaatagttgcttttgttctgcctgtgtttaattaaagcaccatttgagaaattcaagaatcaggtggtaccgttgagtcactggacacatttttaagcaccatcttgaaatgtgatataaattgattttaaattttaaatttgtaatcatacacttcctctaaattgggaatcatgagagcatttctttttaagtagtttgtgataattttggaatttgaaagaaactttaaaggtaatgtatttaaagttactcacagaaatatgctggatgtgttgactggtaactttaaacatgtttatattgctatttttctagcacttgaaaagtaatcatgttttatagccaaagtcatctcctgtccatagaacaattaatagtcataattgatagttttatgcatgaaaattaagtattgctcctgcaaaactgaggagttaatgtctttacgtgctttttcacaaacattccttataatggaacaccaaatgcctacaatttgaacacatggctggtggaaaaaaagaagaaaaagaaaatcaatcctaagccagaaatctgaaaaaagrcagtgactttgggtcattttgtaatcatctttggtgcttcagtgactaaaaaatacatgcagagtgcaagagcaccttgctgaatcctacaccctgccctccttgtgcagttatgttacatgcaactccaaagcctccacagctgttgtctctactctccattcaaaacaatgcacgtgcaactttcccttgtggctggcttcgtcctccacacaccaatgctttgtgtgaaaaggtttcattaaaattgagtttagggtaagtacgggataggtggagaaaagattttcttctaatgcttctccagaccacactgtttagccttcaggagacccaggaattgatatgagcaaaatgtttttacacatgaactgttctttaatcccttttttgcttcttcaatccttgaacttcattccctttcttttcattaacatttacaacacacactttacagggaaagaaagtgaaagatatgtaatgattctgcctgctacatctgactgtactccatttctcacattctatcctcatctttttctagccacctgagtcttcagacagttttaccatcttccctattttaaccccaatttaaacatccacaggaagccaaacaaaatatgcccatctgctccagatgtgtcaaatcaagttctgctattttaatttttttccaggcaaaccctccaacaaatgtataaacaggttgctttttagaagaagtaaagattaatgtctctctgggaaaaaaaaatcccatgcattttggaaagtctggctgttttccccttcaaaaaacttcatgtaaactaaatgcatggcttgatcctcccatgtaccagaaggggagcagcatctttgagctctcttcccaaatcctctgcttggtctgggcgtatcctgtgaatgaggagagaatctaccccacagccagatgcttgcatttggccacagttcatttccaggcagcctggaagagagcatcccacaacattgaacagaggcagccaagatactgtcgggtgatcaggacagctcccgcctctgtgttcctgtggagcctccttcctctccaaggaatttgtcgcatgggactgcataattcagttgtccattcagtcaacagtgatttactaacaacctactttgtgttaggcactgttccagggtctgcgcattcagcagtgagcaaaataacacaaaatgcttgctctcatgaacctggagacagacggtaagaatatacagcrataggcaacatggtaggtggggatgagtgctctgaattaaaataaggcaggacacagagatggagagtgacctggacaggacagggttggcagctcagaagtgcattatctacagtggtcagggaagcctctccagtgaaaggacattaagacggagctgaaggaagggagagagtggatgaaagagcaaaatccctggaactgggacatgcttggcaggttgagtgtccacaagagccccaattaactacaggagggtgagcaaggagagagtagagggagttgaggttagagaagtaaccgtacgtcaaattatggaggactgagtttctcaaactccagtgtctgcgcaaatcccccagggatcttgtgaaacsacaggccttgatttagaagatctgcggcaggcccagggtctgcattcctaccatgcccccagatgatgcccctgcctctaccgttccccagaccatgctttgagtagcagagatgaaggccttcttgcccacagtacaaattctgctatttctttcctgttaatttgaattggtatgcaacaactgtacatatttatgggataagagtgatatttcagtgcatgtatacagtgtgtaatgatcaaatcagggtagttagcatatccttcactgtgaacatttatcatttcttcatgttgtgaacattcaaaatcctctcttctagccttctgaaaagataccccagagtattgttaaccatattcaccctacagtgccacagagcactagaattcattcaccctatctagctgtaactttgtatctattaaccaaactcttttcatctttcactctcccatacccctccctgcctctaatgactacaggtctatctctgtttctctgagttcaatttattttagcttctacatatgagtaagaacatgtggtatttgtctttctctggctggcttattttagttaacatgatgttcttcaagctgatccatgtttgctgcaaatggcagaatttcattcttttttacagctgaatagtattccattgtggatatgtaccacattttcttcatccatccatctattgatggacacttagattaaaggtactctgcttttactatgagtgaagtggaaattttttgaggcttttctttttatgagacaggatctcattctgtcccccaggctggagtgcaatgtcacaatcataattcactgcagcctccactcccagggcacaaatgaccttctgcctgagcctactgagtagctaggactacaggtatgcaccaccacaccctgccaatgttatattttttgtagaggaaggttctccctgtgttgatgaggctgctttggatgcttttaaatagwggggaaataggatcagactcatttttagggagcccctctggctgctctgtgaaaayagggcaagggaggaaataggagacctcctgggagataactggagtagtctgggtgagatacttcagtgccagcatctaaggtacttgcaggtgggacagccacaacgaatgccacttcaagtgaatgtgaggatcagctctgctgcccaygtggaaacataagtaaggttgttacctgtggccttgcagaagcctgcaagtcaaaggccttttgatggttggtgaaaatcacatctgatatgcgtgattccaggaagctcatctgcctcattcctgaatttaatttctatccatgaygcacatattactattgcattaaacgtgaagtcattgcctcctgccattgtaatgtatgcatgctattgcagaggaaatgtttttatctacctcccaaataagtaagcataacttgagctcgcattacaaaatgacacaataaactaaaaaggaattcatttaatatttttaaacatgattttggtgtccttatatttagggaaatattttattgtaagttcatcttacaataaaatttataagggaaagatattttattgtaagttcatctcaggacaagaaacttcacttggcatagaaattaacatccaatctgcagcctgtcattgtagtgagatagtcttgaattccctagctaagttatttacctaaacaaagtcttgttcactttgaatttcctagctaagttttttacctaaacaatcattatatatgtttcaaaatatttaaatttttcccttccctctgattttataattttcttgataaaccttcctaaatatctttaaatttcactgatctaatggttcttaaccaggggtgattttgccccccatcaagggatatttaacaatatctggtgacatttttaactatcgggagttgggggatgctactggtatgcagttggcagaggccggggatggttaagcattctgcatacctgggagggccttccataacagaggatcgttcattccaaaatgtcagtagtgccacatttgagaaaccctggccttctggtgaccacaaggccttcagctacagaaaataaaattcaccaaagatccccacagccatgctttgaaatccttcacagtttgcactgagccatgcttcccacaggctgctccaatgaaggggattactctgaaggccagctttggctcctggattctccaacatccgtgccaaacctttcttatgcagcacagtagcctcagacatttccagctcactcccacttttctctcaggacatttttcctataaaattcttgcacatttaatctcatttagaatctgtttctcagagatcctggattaatatatcatggcattaaatcattgaaaataatgaattaatgatctttcctcattgtagtgatatgggaagaaaacgttctgatacacagaacacagaaatggctcagaaatgagaaactgactgactactaaattgttagtaaaagcaacagaataagtaagtgaaaaatagagcaatttggggggaaaaaaagttgagaaaccccaatcttcaaaaaaaggataaaagtcttagcttttgttcatgtgttatttaaaacccaactcaggcctcaactgaaacaactaaaattaggaaccaaaattgcatcccctgcccattcacacttttggaaccagagtggttctggacatagtcatgaggtcatcattcctaattagagtaggaatttcaattcttgggtttctaacccaaatctcgctatcctcagaaagcttgacagtatttgcagctctgcccattagatgagatctaccctttgcctttggtcaggaagagtcctatgtatggacacatcaccacagaccactcagattccctcttaccttccctaggacactctgcctcccttcctcctttccatgatactcatcactctgggtagactctgcccaggcaacaattgccctctgtggtttgccaagacccatcctgctttctgggaatagatgagtccctctaaagatgggcatgtccccagccacccaccactgtgcaggtggcagctgacgtctattgtcctgcaactcacatatcctgatctctgctctgttatgaactccagccagagaaatatacagatcttattcctgattcataagagactgtgtttgccttggatttaaccaggtctgatgactttcaggatttattatgttgatgaataaagggaaattctctcccttaaactaacacaatgatctctctgaatcagattctccctatacgcagccagcaatactagagaagccccagagacgctgctacttgagggctggcctaccgcagagctggcgtttatgttgtgatgataaacattcttgaaaaaaccctgaaggagatcctggcattttcctagtgcctttatgtgccataccgagtgcaagctgcttttcatgtactaactaatttaattcctgcaagagtcctgtggcatgggtatttcttattcccattttactgacaaggacactgaggctcaaaaagttgtttttttgttttgttttgtttttgagacggagtctcactctgtcgccaggctggagtgcagtggtgtgatctcagctcactgcaacctcagactctctggttcaagcaattctcctgcctcagcctcccaagtagctgggattacaggcacgtgccaccacatccagctgatttttatatttttagtagagatggggtttcactatgttggccagaatggtctcgatctcctgatctcatgatccacccaccttggcctccgaaagtgctgggattacaggcgtgagccaccacgcccggccaaggctcagaaagtttaagtgacttgcccaatatcacaatgttagtaagtggtagaggtataatttggattttatttgaattggaaaaggctgtgatctttctaggtgatattctaggtaacactagtttccagcaggcactctccattacctgcgtctgttaggtctgagtctgctatggttttctgactgatgtgtagggtaacacaattaaggaactctccactggaaggccaagtctccactcaggcacgtaggtagctggcagtcctccttgattctgctagccagagccagcttattgaaaacaaaagcagtctgttaggacagtgcccagacttctgacttcactacggaggctaggaaccaagtcaatatcatcagtcattactttccatcaacctctatcatttacatgcagtaggtgctcagtaaatgctgataaattcctgtatgaataataaatgaatgaacaaacaagagcatttgtctgtacaagttacagagttttagaatagaatgtaagtgtgaagctcgataaattcaaacttctgcaatatccccaccaagtggttatctaaattccgtttgacttcccttggcagggaatacgcacgcacactttctaaaggagtttttccacttcatatgactctggctgttcagaaggaatcactaattaaatgagatctttgaaaaaagtcaagaaactggaaataagtaggaattgctttacctgatgcttatcagcttacaggctttactgctccaaaaatttggttcgatttgaaaacattatgctaagtgaaataagccacacacaaaagggcaattattgtatgattccttttatatgaggtacctagaataggcaaattcatagagagagaaactagaatggagattcccaggggccgtagagggagagtagttattgctgaatgtgtttggggtttcagtatgtggtgaaaaattctggatacagatgctcacatgtcattgtgggtgtctttcatgcaactgaattaggttttttttttgtttttgtttttgtttttttttttcagataaaccatgaatcacattttatttattttgtcctttcatttttttttttttttttttttttgagacagagtcttgctctgttgccaggctggagtgcatggtatgatctcggctcactgcaacctccacctcctgggttcatgctattctcctgcctcagcctcccgagtagctgggattacaggtgcccaccatgatgctcagctaattttttgtatttttagtagagacggggtttcaccgtgttagccaggttggtctcgatctcctgacctcgtgatccacccacctcggcctcccaaagtgctgggattacaggcatgagcctcaacttttattttacgttcagatggcacatgtgcaggtttgttacatgggtaaattgcatgttactggggtttggtgtacaaattattttgttacccaggtggtgagcatagcatagtacccaataggtagtttttccctttttttttttttttttttttttttttgagacagaatctcgctctgtcgctcaggctggggtgcagtggtgcratctcagctcactgcaacctccgctcctgagttcaagcgattccccctgcctcagcctcctgagtagttgggatgacaggcacctgccaccaggcccccataatttttgtatttttagtagagatggggtttcaccatgttggccaggctggtctcgaactcctgacctcaggtgatctgcctgcctcagcctcccaaagtacttggattacagccacgagccatggcacccggctggtagtttttcttcctcatcctcctcccaacctccaacctcaagtagcctccccccaacagtgtctattgttcccttctttgtccccatgtgtacttagtgtttagctcccacttattaagtgagaacatgcagtatttggttctctgttcttgcattaattcgtttagacatggcccctccagctgcatctatgttgagcaattaaaaaaggttaagatgagctaagtgaggtggtatgcatctgtagtaccagctactcaggacrctgaggcaggaggatcacttgagcccaggagttcaaagccagcctgggcaacatagtgagaccccccccatctcttttaaaaaatatttcagatgataaattttatgctgtatgtattttaccataatacaaaattggttgaagaggagtacatataaacacaacaacgaagtgtttaactcatcaatttcagatacacagtaaaagaatgtatatgagaattggtcaaggacattctgaggctttaagcttcaagtcaagaaaaacaactgcctttctgaaaacttacaccgctcacagagtctggtgggctatgaatttgatggtacaacttctaacttgacagtgtggagatcaagggtataggaawggtaaaaagctttgaaaagtttgagagtggagtttgcacagctggacacagggcaccacaaacacaggtggtgcatttgtgcctttggtggacaaagtatcacccacaatgcacaggcgcttccctggctggacaataggtctctctctccatcccctctctctctgtttcaagagaagacattttacgtaggaccttccactctgaatatgaagggtatatcatttccctctcaaatccagactcctctagttgaatggctgacagccaacagaaggggtgtatgcacccttcattaggccagatttactgtccgccttccatgagtggttcagcatgctctctgtccagctgtggctcctgcctgcaaagcgtgccatcagcttcctggttcagagagagctaattttctctaattgcttccaatgagaggtgggaggcaggagggtatgtgccccattcagagccgctgttctcatcagcctcaccaagcagtgagagcagctttcacattcaaggtcttctttccattatttgggtaaaaatgttttgtctcataacctgggatttaagaatcttcaacaggttgcttaacccttaaagatctgacccacctggcctttaatagatttaaagactttatttggttttatgatttttaaaggaatcataattcctacttatttaagaactttaattcctatataagaataatttattctcattcatacttgtaaaaaaagtgtatccattgttttagaaaaggggaaaatagaagacaggttaaaaaagaaaactaaaaggcatttggtgttgcttagatgtacatgttttgtagtatatatatgtggttttgatcataaataatgtatcaaagacatataataccaatttctgttcttttttctgaaatcttagaattgagtccttagaagaaataccaagctaaagggcatgtgaatttctaagtttcctggcacttaattccaaattgttattccaatttctagtgtgccatactacatctttattagcattcaggattatcttcttggttaatatagtaaaatatcattttgttgtttgaattttcattgctttgataattgatgrtatttaaagatgtttaggctctttttttctttttcatttgctcagcttttctgaaaacctttaggagacaagtttctcccaaattttttctactgagatttatgcattactgatatgacttctaacatataagctagttaacatcaagaggattagtctatcacaccacttgtcacctggggcaaggtagtatccagttcattagggtaaaggtcaagtaagtgttttgtttgtttaaaggggaacacgggtaggagttatcccaaagttagaacgcaatgaaacccaactatatagtaaaatayatttggggctcaactctgttagccatcaaaggtagtacaaaacatcagaagatgaagagggttttgaaagaaagaagggccatgtcagattaagaggtagaggaacatcaagataatttttcttctattagagtttctcttttagggtttctattagagtttctctaatagggggtagagaaacagcaagataattttttttctattagaatttctccattagagtttctcacctgcaaggtgttgactttccagttacctggcatttcattctactttttggaatggcctgagctgaaattaatcaggctctgttgatgatgcatccaccagggtttcccaktggatgcttagaaaaaattccatcacagaatatctgtgtcttgtcttcttgggggctaggagatcccccaaatttttctcttctgttcttgtttgataaaggatgtgtggaggacctggtgcttragagtttcagtttgacataaaggtactagttctggagagtctcttgggccactttatgttaacaaagactctcttgatcagcctttagttaagcttctctgagctctctccttgactaggcttcaaccttgggcttctgtgtcagtccttgtggagtctggttttagcaagaatcttgcaaagtcagtttagagagaataccccaccttttatatctgatcaatttcctcaatccccacctgtaatgtataagcccttgacctgccttgagtagaaatctcctacccttcatgtctcctcctagtaattttccatccactgaccccacactctgctctttgactctaaatcttcatttgtccttgttgtcttcaatgtcgaggccaatctctttcccctaccataatatctctattgaaatagtcctgaacaaagtcttccttgccattttcacacgtgccagaataatgcttgcctccctgcctgcctgccttccttccttccttccttccttmcttmcttccttccttccttccttccttmtttcyttccacagaatctcgctctgtcacccaggctagagtgcagcggtataatcaaggctcacagcagcctsggccttccaggctcawgtgatcctcccagctcagcctcccgagtagctgggaccacaggcacatatcagcacgcttggctaattcttttttgccttttgtttgtttgtttgtttgtagagacaaagtttcactatattgcccaggctggtctcaaactgctgggctcaagcaatcctcttgcttcaaggtcccaaagtactgggattacaggcatgagccactgcacccagcctcacaattttttctttaacaatgcccagagcatatgctgagcttcccgtcactctctggggcggaatggaatattacacaactggcacggtaaagaatgcacttggttttggtggtggataacattttcctttgcacctgaagcacttccacaaatagcccatttgtcctccttgcaattaaattagaaaaactgtctctaagcttggtttgacctatctgtagctctttgaaaagactgcttgatctttcctcactctccgtgtacctaaatcttgttcaggctctgtccagaaatcaataggaaacataaaaccttgaagcattataaaatcaggcattctaaactggaaagggcctttgattatttagcccaaatgcatcacctgttttacagacgagcaacctgaagttcggagagstggaacttcctccaggtcatctgctgcactggtgatagaggcaggactaaacactctcggtgcagtgttccttctctgagtcatgttgactactatatgctcattcacagtcacaaactaaaaatctcagacaagtcaaaagcatacaattacaggaccagaagactcctcagtgattatctgggagtccaggcatccaagggacttgaccaagtttttgcagctattgctggtagaccaagtacggaaatacacttctcttgactctcagtctagtgctcctttccctgcagtactctgtgcaataccaaaagatatggatctccaggattggctgaggttagcaattaatatggtatttttagtcatgtctacttggagtagggggtgctgatttttgtttcatgtgtgttcttgagactttttgatgaggttccgtatgcctcactctaggtgatgtttttattagtaccatgttgtcttcctataaagagtttttatggcgaacagaaagctgtctggattcttgctatggttgtaggcaggagggaacatggtgtgtggcttctgaacaaactctggctgctctttaagttcaatgaagtgaaaaaaaggcaagttaattgactacagacatatgcaagagagctctcaattgagccataagatcttttggratgtgggtgtttacaaggtagctataagcactctcataagtactgcacctgtgaatcatggactttcattgtacatagctttccactgcttgcttcttgaggctactgttcagcccatcagtaatttttaaagatcctttagaaagttatatagaggaatgcaaatgtgagtaaacaaggcgcctctacctactgatggcatcttcaatatttacattggcccgttgagttttatcagctggatattgctataaaacacatcacctgaaaattaagtggtttgaaataatgagtatttgtagttgttcacaaacctgtgggtcagctgggcggtgctgcagatctgaaccaggtgtggctgatcttgaatgggctctttcctgctgcggaaggcagccagcaaggtaggtgggggctgatggtcagggatggcctcactcctatgttttcccattggctgactatcagccagggctgcagtgatgactggtgaaatagtttggatatttgtccactctaaatctcatgatgaaacttgatccctacagttataggtggggcttaataggaggtgtgtgggtcatgggggcagatctatgatagatggcttggtgccattctggcaggatccagtgagttctcactcttagttcttgagagatctggctgtaaaaaagaacctggcaccttcctctcctctctttcttcctttctgtctggccatatgatgcctgctaccctttaccttccaccatgagtagaagtttcctggccgggcacggtggctcacgcctgtaatcctaacacttagaggccgaggcaggtggatcacctgaggtcacgagttcaagaccagcttggccaacctggtgaaaccctgtctgtactaaaaatacaaaaattagttgggcatggtggcgggcacctgtaatcccagctactcaggaggctgaggcaggagaattacttgaacccgggaggcagaggttgcagtgagccgagattgtgccattgcactccagcctgagcaacagagcgagactccatctgaaaacaaaacaaaacaaaacaaaaaaaacctccatgcttcttgtatagcctgtagaactatgagccaaataaacttattttctttataaattgccctgccacaggtatttcttcataacaacgcaaatgaactaagacaacaagtctctgtgttctccttcatctatcatactacccgaggtttgtttacgtggtaaagacaaggttcggagagaaatggttgaaaccagcatagcttcttgagacacaatgacacttatgccacatgctattggccagagcaagtcacagaacatctggattcaagaggagggaaatggattccacaccttgatggaggagatgcaaagtcatatcacttgggacatggatacagggaggggtgcaatttgggatgtttttgcaattaacctaccacaggcttaaggaggcttttaggatttaccttctgctctaatgagtttcaaccaccatggcttagagaacatttcttaaaactcagtcatctttcatgtatccattgttctccaaagggactaagttttgttccatggtcagtcttttccatgtgttcttggaccttatacaaaacccaagcctggaattacagcacctggatttattcatcaagcattcgccagttcctggttctatgcatgtgttcacaaaactcagaacagggcattcctctgaatagagaagaaaaatagagtcagtcagaaaagaaattttttgtctaagaatacaatccaccgtactaccaccagacttggttccctttcaatgtcgagagtaacacattccttttatgtgttgcttaatttgcttgttttaagcagttccttgtttttggagtgtcttttttgataacattgagataccacatccactgatcatgtctaaaagctgacaatttctgaaggaaataaactgttcaaaattaactactctctcactatatatatagcattgtattttcagtacacatttttggtacacatattcgtggtacatattttccagctggcttgtgctaatgtactagtgattagaaccaagactaagaaaaaagtgcattgccattttcaatcaacgtgggtagagctgaatggttgattccaaatcaagttattttgcctaaagcaagacagataggagagagagagagagagagataatacagagatagataatcacaaactgccatttagagaaaatcattactactatcaattataagagtgattagcaagtttatggatagcatgatggctagcaatctttatacaaatgtggctgattttcactaagtcttttaattctcagaattgtttcatgacttttttggagaaaattgttgaggcatgaaaagaatttcatgactgagatagatattgtaccttaggaaatataaaatttaacaaatctgtagaaaaggaagacttaggctttgactttaaaagcccattccacttacaagatttcattttttgtttattcaatttggaaagcacattttcttatataatcaataagaagatttttatggcatgctcgagtgtagtctgattccaggtctcataattcctttgcactcaaaaaaggaactttgttacatcttgccactcatgctcactcttcagtgggcaaagtgactttgccatactgtcaccatccttgagccactgcccggtccttgaaaactaggattcttcatttccttttgcatcgtcagcgtgaggaaggggagggggaggtaagattctggacagctggactgaaaacaatggaaaatccctagtaacagcttgaatcactcactagcaggaggaaaatgtgactcgtttcttttcctctttagcttttgttgatttttttcataatgagctcagaaagagggaaagatcaatattcatgttgagttggtatccatcatagtgatattcagtgattataactctccaattctcactaggacaaatataaccacgcaaactggctaactgcacttgctggcatggttcctttggaaactcctggatttctctgaattacaaacagaaggagagttatagattttgtctctttaattttctgtctcttgaaatctcagatcacaaaaattgagtctttcttaactggtgatttcttattcgtcaatgactccttaaaagatatgcagaaagtaatggccctctaacccttcacctttgtaagctctttaatcctgaggggatggacttcctgatttctgttctctcagattctaaggaggaaaagactagctgttgtctctcaagtctacctattgctgtcctacagagcaaggacccctcttgttctccagctcctcaggaataggattcttggttccctaactctaaaataggagctcacaaggttattgtcaaggacaaatgagggcagtgttaacgtattaaaaaaaaaaaactagtcagagattgcttgattttcaaacttgatagtatgctttcgaagttacataatcaaaattatagttgtatttaaaatgttaagttcagcttacaaaccttcttaacctatttgtaagtcaagcaaattttaaaaatccttcttaagggaagcttgattaatgatttcttctcattttcaaatgtagttaaacatttttaaacacttaaagcttgatttgtaaatttaatacatttaattttaagtactttagcttgtctaacttaacaaatgagatactcatgaatatttgaatagctcatcaattagatacttataaatatgaaatatagtttttaagttcttttaaagttctcaatgtacttgtaaacttgtaaggatttcaggtcaaaacgataagtttaaatcatttactcgatttaacattttaaattggaagcacaattctaattcactattattttaataggccaaaatatcttaaaattacaagtatataaaatatcagggccaggcacagtggctcatgcctgtaatctcagtgcttttggaggtgaagccaggagaatcactcaaagccaggagtttgagcccagcctgagcaacacaggaggaccctgtctctacaaaaaatacagaaattagccagaggtggtggcatgcacctgtagtcctagctatttgggaggctaaggcagaaggataccttgagcccaggagtttggggctgcagtgagctgtgatcacaccactgctctccagcttgggtgatacatcaaaactctgtgtctataaagataataaaataaaaatatgactaatgcaaaattatttgatactatgggtttcatttcatacagtcatatgaaatgaaataattatgtatacaattatatatatatacatatatatagagagagggtgtaaatatataatttattcttaatgctcaatcttatcagagctgaaagatggttacccatgaaggaatcaatgacaccatttcacatatgattgcagttaccattcccttgtagktgctgggctagctctctcagctttccgagatttttttgaggctcagaggacctcctctcctgaatgagaactgggttctaacgaatgaccctaactgtgccctgttacagtggctctgtcttatgcccacgtgaagtgatgtcacagaccatattcacgatatcgaagctacacattactaaaccttctgccgacccacagaagcccaaaactcccatcctcatagtcatatcaatggattagattttattatatttgctgcaaactctttttataatgttcttcctactcaccttattcttatgtctattctattgagatctaattaaattatgaatgtctcttaagactctatctggctttatagtgacaacatcaaaggatatttgtattagttagggttctgcagagacacaggatgtgtgtgtgtgtgtgtgtgcatgcatttgtgtgtgtgtacacaagtcccaagatgtacaggttatgttggcaagccaggagaaccaatggtgtagttcccgtatgaaagccagcaggctccatacccaggaagagctgacatttcagttccagtccaaagtcaggaaaaagccaatgtcccagtttgaatacaatcaggaaggagaagttctttcttattcaggggaaggtcgccattttgttctcttcgtgtcttcaactgactagatgagatccagttacatgaggtagggcaatctgttttagtcaatttatatttaaatgttaatctaatctaaagccaccctcacagaaacaccagaataatgcttgaccaaatgttgggtctcctcataacrtacaaagttagccatcacgatattttcctggcatacactgtgaaaccactgacctggaaccctctgacttctgtcagctatttaatagataagtctttctaatcttgagtgtttgtaaagcagttggatataaatttgaaaatttttaaatgaaacgataaatcatgtgtgacctcttgagcctattaatcctaaagtaaaaagtccttgtacaaatttttatccactttttttttttttttttttttttgagacagagtctcgctgtgttgcccatgctggagtgcagtggcaagatctcggctcactgcaacctccacctcctgggttcaagtgattcccctgcctcagccttcctctcaagtagctaggactacaggtgcacaccaccactcccggctaatttgttcgtatttttagtagaaatggggtttcaccatgttggccaggctggtcttgagctcctgacctcaagtgatctgctggcctctgcctcccatagtgctgagattattgctatccactcttgatactgtttggcatgtgacttaaaacaagcaacagttgaaaatataaactagaaaatgagcatatatgttcattgttgctaaaggcttggtaccagcaccagctacaggagtttatagcataccttctcagagaaaggcctcttcattctgggtttagaggtgttggtatcctctgttgcaagatgttattcaatcaattcaatcctgagttttcaacatcagcaacattacatgtgcatttacaggaagaagaccagagtaggaacactttcattttttcccccaaccatctacaaaaatgaagattacctgaaatgtttactttatactatgatcttaaaactatttattttaataatatctatataacccagatcaagaaaaccagtgaaaattagcctattcaatcctttcaaaaggcttttttattccaaaagattgaataaaattagttactccctttatcctgaatttcactacaaatattacatttgcaaatgtcccatctgactgtaataaatgccagtgactttaactctgtggttggtgatatgaagaaaaccatatgtgatagattctaaatatataaccacaaaagccaaactgacggtttggaacatctcagcaactattattgattactacagttgaagaggttgaatcagtttgcatggcaattctcctcctcttcttcctcccatacccactcctcctctttcttatttttctctcttgctytctctctctgttctccattcgttgtttctttctaattcgcagtagcagtagcagcaaccagaaaaatatttgagaactttaaactaaatggttaactaataaggcaataaatagaaggtgtgacactgaacgaggagtaaaagccaatgcattccactacattgagagacatttatgaagtatattgagttacacagacactaacattcagaaacaataaaatagagacagtgtaaaaggctaaaaatgggctgggctcggtggctcacgcctgtaatcccagcaccttgggaggccaaggcaggctgatcacgaggtcaggaatttgagaccagcctgaccaatatggtgaaaccccgtctctactaaaaatacaaaaattagccaggtgtggtggcacacgcctttaatcccagctactcaggaggctgaggcaggagaatcgcttgaaccygggaggcagagtttgcagtgagccaagatcatgccactgcactccagcctgggcaacagagtgagactacgtctaaaatataaaataaaataaaataaaataaagactaaaaatggcccccaaaagatatcaggttaaatccctggaacctgtgattgttccgttatatgataaaatatatgatttagttaaggatccccagaggaggagcttaatctaaattatgaatgtagtaaatgcaatcacatgggttcttctaagagagacagggggtgttttgagatagacacacagggaaggcaatgcaaaaatggagcagaaggggttatagctaaaaggaatgccaagggccaccagagctgtgagaggcaaggaacagatttttccctggagcctccggaggaagcaggccatgctgacacattgattttgtccttctggcccccagatctaagaatatatttctgttgtgttaagccagcaggtttgtagccatttagcagccacagaatactaatatggacaatgatttctgagaaaataaaaagattattttgagaaaataacaacattccttgtttgatttttaggaaaagccattttattttaatttttttctatttttttatttttattttttacattgaggttctctttattttttactatttcttttttcttttcgtcttcttttttttttttttttttttgagatggagtttcactctgtcgcccaggctggagagcaatggtgctatctcagctcactgcaacatcygcttcccgggttcaagcaatttcccacctcagcctcccaagcagctgggattacaggcaactgctatcatgcccagctaatttttgtatttttgtagaaatggagtttcaccatgttggccaggctggtcttgaactccttacctcaggttatcagcccacctgggcctcccaaactgcttggattacaggcatgagctacagtgcacagcctatttctgactatttcttgacggccatccatgctgggggaacaccctcatgtgcctgtcaagcccaaatcccactctaaaaattcagattcccttttctgactccgtaggatgcctgtccacggaggtctcataaatccccaagcccacattttccccaagtcctccccctgctggttacctttcctttcccactcacatggagcaggtgtccgaaacaatgggttttgggcagaaaacgcattttagtcaactgttgtataaatattctaaactagtaattaagattttaagcatgtgctctggctggtcatggtggtcagattgcaaacagttggcaatcttatttcagcagtagactagaatctggtcataatttatccaagggaaaaaagacttgtcattaaattctctccaacggtcctaaaattttaatttatccacgcctaccttgtccattactgttttaaaacagctttttaaacgtctagattccagccctgtgtagaatcaaatatattagaacttagtcttgttacttggtctgaattggaaacatttccagtgcctaccagttgcacacatcattatccactcataattagttgtttaatctgaaaagagcaagttctgctccatcacctaacatctgttcacttttactcttagctctgttcaaccaaatcccattattgtcaggagaggctctggcagacttgtatcatttacgaatggtttctatttctttgtagatttctaattctttgttctcgtagctgctacattctctgataataaataacattatgcagttatttttcggaacttgtgcttgttttcaaaataacaagactaagaactaaagatttatttgtctgaagtcacacagtgcctcaaaacatatctcaaacactaaaaatattaacatccacaaactaacacctacttataaaaactctagcaattctgagagaaatggattatttacaatcctctctctgctgatgttactgttaaatgtcatattaactcccagttatactgaaaccattttaaatgttatagtactttgaccttggttgtgaaaataaagtgtctagtgtaattatttagggatagtatagttcctaattaagacaaaattttcagcaaagatgattaaaatttgataagcttttaaatttttgtgtaatttctccaaataatgaaatgatttctttttctaaaaaaatctataaatttccagactgaaatatgcatgtcagaataaaggaaaattttattatggatctgaagtttgctccattttataacacatctagaaaatttggggtactggcagagtgaacccacagaagagattctgatgaaactgaaagtggattggtaggaaaattgctttacaataatctctactacttgcttttcatgtaggggtttgggaattagtctcttatttctacaactttctatttaactgaaaagacctaacatcttataataggattacactttctggtagaattttcatgatacaattcatttaaactatgttctttgcatgttctgatgaagacatttcctatgatggcattttggtctttctatctccagggaagtcaagtgattggaaagaattttaaagagacttgggctgagtgcagtggctcacgcctgtaatcccagcactttgggaggcccaggcaggtggatcacgggtcaggagttagagaccagcctggccaacatggtagaacctcgtctttactaaagatacaaaaaattagccaggcagggtggcaggagaatactcaggaggccgaggcaggrgaattgcttgaacccgggaggcggaggttgcagtgagccaagatcgcgccattgcactccagcctgggtgacagggcaagactaggtctcaaggaaaaaaaaaaaaaaaagagagagagagagacttgatggttttctcttgaaaaaataatctcttagccattttccactgccacgagtacatgtacattgaaattagtgatactgaatttatcattggcaagatatctaaataagatttactgtagattaccagcgcattaaggagctcctggacaaaacatgtgcacattttctggctgagaagtgcagtcattgaagatttgtagaccagaacataacatattgaaccccatatctatctatatgccagtgtgtgtacttacatattaatttctcctatgaaagaggaattaataggaaaagaaaagcaaggaagtaatgttcaaaacttccttaatggccaggtgcggtggctcacgcctgtaaccccagccctttgggggrctgagaggggtggatcacctgaggtcaggagttcaagaccagctgaggtcaggagttccagaccatcctggccaaactagtgaaacctcgtctctactgaaaatacaaaaattagctaggcatggtgtcaggtgcctgtaatcccaactacttgggaggctggcacaggagaatcgcttaaacctggaaagtggaggttgcaatgagccaagatcctgtgccatggcactccagcctgggcgacaagagtgaaactttgtcccaaaaaaaaaaaaaaaaagcttccttaaaaacaaaaaaagcttatgttgccattatttgggctattgatttttttctagtgcaaaacatatacatatttgatatataaccttggaaaatacacaaaagacaataacaaaacactcaaagtcctgctatctaaaaataaacactttgcttctagagttacttttattcatatttttaaaacatatttataggccgggtgtggtggttcatgcctgtaatcccaacactttgggaggccaaggcgggtggatcacaaggtcaagagatcgaaaccatcctggccaacatgatgaaacccccactctactaaaaatacaaaaattagctgggcgtggtggcccgcacctgtagtcccaactactccggaagctgaggcaggagaatcgcttgaaaccaggaggcggaggttgcagtgagccaagatcgcgccactgcactccagcctggtgacagaatgagacgctgtctcaaagaaaaaaaaattatatttataattatagtgagtattccatttctgtgtcctgcctttttgtatttatctaaaatttaatttaaaaatttctagatttctctgtaaaatcctgggaaaatcaaggcaagttcatagtgatctatgagtaatctattgaaatagcttggcattacataaaagcaatcccttcaggtctgaataaaaccataaatagaattttccttttggcatttacttcattttagactcatttaaatagtaggtttatcaatgcagtttattctgagcagagggatgatgtaatgtataatcagttactcaagtcaaaatgccaggaaagtatatgaataggtagcaacaaggtattgggttgaaaagaaaatgcttggctggctcttagatggcttgccctttagttgctactttccttggaccctttccagggtctccaagcatgaaggacccatctctcaggaagaagtccttgcccagggctgtttatcttagttgagtacagccaagtacaaaccagagcgaagttgggtcttgatctcctattgggtgccactgtctctgctttcttttatggctaacaagcctatactaccacaagccacatttcatttgatagcatgggtagtggaagagagcatccaaagccagtcaatcctaaatcatgtctgcaaaaatatctgtaaggataaggcctggtggacctcaagaactgtctccctctagtaataatcatataacattattattttkcagtgaaaaattatccagtacacaagcagtctatgcaatgtaatgagaagaatgctttgcaactgtactactagaagcgaactaattcatgatttatttttaagtgattagaacccttagtttatctgtgagaacatcacttaaataaaatgttttaaaatatgcaatgcatatgcaatagcattaaagtattaaatagcatcttaaagagcaaaagaaactattaagaataattaagtggatttattggctaattggtgtttccacatgtagttatttctgcaattattattcatttgctgatttacatagagctattctctaaaattactctggcattaaatgaagttagaagacatctccagtttggaaaatctattaagcaaakccttttcaacttaaagttgaggtgatactgaatcaaggcctggcagaactgactayagactcagagggagtatgtttattgcttttaattcttcctatttctgtttgaactaacatggcaaaggctttcatmttccaaactacacttatccagtctataaaacaaagatgatattgtttcaactataaagcacagattaactttgggaggctgaggcaggcagatcaccagaggtcgggagttcgagactagcttgaccaacatggaggagccccgtctttactaaaaatacaaaataaccgtgtgtggcggtgaatgcctgtaatcctagctactcgaaaggctgaggcaggagaatcgcttgaacccaggaggcggaggttgcagtgagccgagactgcaccattgcactccatcctgggcaacaagagcgaaactcagtctcaaaaaaaaaaaaaaaagaaaagaaaagaaaaagatcgggtgcgggggctcacgcctgtaatcccagcactttgggaggccaaggcgggcggatcatgaggtcaagagatcaagaacatcctgaccaacattgtgaaaccccgtctctactaaaaacacaaaaattagctggggatggtggcatgtacctgtagtcccagctactcaggaggctgaggcaggagaattgcttgaaccagggagtcagaggttgcagtgagccaagatggtgccaatgcactccagcctggggacaaagttagactctatctcaaaaaaaaaaaaaaaaaaaaaaaaagaaagaaataaaaagcaaatactaccaaattcttacctaccagagttacgactgctataacccttaacatttaaacaagggaaatcatcatttgggaattgtatttcctcttcatacaaactagtcttccatggtaatagattggctggatgtttttccagtatgttttctagataaatagtccttggagccattgtttccctaagaattaccaaaaaaataaaaacagaaagcaaaaacatgtttgctttctgctggaacatacatctcaggcagtgccgaggactaaagataaatttgatacctatggaggaatacattctaaaaataagattttatatctgtttgcatgttaacaaaacttatttgtaaagacacacattctagaaagtaacctcaaaagtactcttataaagcacctcattttgaaagtcaagtagagcaattcctgggcagatgataatgatactgcagagacatgtgaagaaggaaaaaaartaataatttcgctccctgtgttagtctgttctcatgctgctaatgaagacatacccaagactgggcaatttataaagcaaaagagatttaatggactcacagttccacatggctggggaggcctcacaattatggtagaaagcaaaggaggcgcaaaggcacatcttacatagaggcagtcaagagggcatgtgcagaggaactgccctttatcaaaccaccagatctcgtgatacttattcactatcacgagaacaggatgggaaaaacccactgccatgattgaattcccttccactgggtccctcctgtgacacgtgtggattatgggagctggaattasagatgagatttgggtggggaaacagccaaaccatatcactccctaagactattacatttcagcagttagatgaagagagaaggacagggttcagattgaatcattttggatggaggagaacatataaataattgaacaataggagcaccacctagtttagagacaacctaccacaggcaaatacctcacatgacttcattgttctcccccacaccttctctaccatcagatttcacccagaaccctcatgtgccacagaacttcaagtaaataccagccctggaatactagtcagaaagctgaaaaaaacgtgcaatatgagtttgaacactctgagatcgttaacacttttttcaataaggttagataactaagatgataaataaaaatattttaaaacattaataaagaggaaatgattctcatagaattagtatagccaaattttatcttcttaattgttgtatttcatcaagagacatagataggattaattttggttttctactataactgcttccatcagggaaaatagattaatttctaaaataccaccagaatcttagagttgtttatccaagaatctctaaagacactttacattgcagagtaagtcaataacatgggcaaatataaagctagggaacatgtgaaaaataaaattatgagttacaaacattaaacattatttcagtagaaacagattggtggctgcagttgattattaaagaatgccattaagttgtcaggaataactgttgtagttttctgaaaatagtcattttgttgtagctttagattggattagctagagctatacacacgagagatgcacatcaggccttagacacaaattccttcaggaaaatgattcactggctatttagggggttgacagccagtatatgttgttttcgagtcacagagaaaattgtatggttgtatattctgctttaatttacatcaatggaagatgagctacaaagcagctattgatacaaaaggcaaacccattgtagaaaatgaacattttctgtaagctacatctacattcttcctgatcagaaaataatacagaaagtgacatacttgttcctttttcacatttgaagaaaatgttacaaatgcctccatgatgcaattctgtatttagacaatctaagcattgagtcttgggatacttattctgtaactattttctaagaataacctgaatagaaaacatggaatttggtagtaaaagatataaataatgaaaataggggtagggtcctgtgcctcagtgaagtttaaaatttaattgaacttctaaataaatgtttaaaaatagagcagtttcaaaaatacaaaagctagaatattcatagacccctgaagatacttctacagtatcccacagttccacaatctctgattcaggaaattacattaaaagttatatgttggcattttggaatttcatttggtatacatacctgcagacagaggcaataaaatcacatcaatggtcggttacaaatgaagtcatccagttgacccagggtatgctttggctaaattttgttttagatttkccctaaaatataattgcaatattgaatatctctaatagatctcaagggccctctattagtccattttcrtgctgctgataaagacatacccaagactggacaatttacaaaagaaagaggtttattggagttacagttccacayggctggggaggcctcacaatcatggtgaaagtcaaggaggagcaaatcacatcttaggtggatggcagcaggcaaaaagagagcttgtgcagagaaacctccattttgaaaaccatcagatctcgtgagactcattcgctatcatgagaacagtgcaggaaagaccggcctgcataattccatcagctcccacgggttcctcccacaacacgtaagaactgtggagttacacttcaacatgagatttgggtggggacacagccaaaccatatcaggcccactttgcaaaatatcaaaacagaggggaaaagtataagtaactgaagagaagggtgcggtgtgctgaatacaaagatgctgactggggggagtgaatgtacctgcatcccaatttgcctgggaggtctggttttacccattgtctgacattctgtctaatttagcatttgtcctgaatatttcatttagtgatgtattattgttattagttgcattaaaacaagccaagatggattaggtagacctccacgttgtacttccagtttcgtcatgttatggtcttgggggtgcaggaattcccaggtttccttgaggtgaaatctgaaagctgagaaatatagcacagctcacaaggaagaagtggataaaacagtgtcctcagagcagccagggaatcctaacccctgacgatcttcagtgaggcatttggtactccaacctgttgtgccttagccctgagccccagtctgtgaggtgcatatggtcctagctaataggtcagtgggaaaagggagaaataataaacgaggctgtgtgtaaacttacgtgtaggaaacaggttaagctgttctgccctgttgcatgcagagagtagtctgaatgctattgccacagtggttttatttttattgtgtgatgtaaccatatgccaatttttttctttgactattgactcactattttataatgcatccttctggcaataatgaaataaaaattagtaaacagaagtaactgtttaatgaaaatgaagtatttgtatttctatttatcaagaaagaaaagacgaacctgtggcatgcagagagtagtctgaatgctattgccacagtggttttatwtttattgtgtgatgtaaccatatgccaatttttttctttgactattgactcactattttataatgcatccttctggcaataatgaaataaaaattagtaaacagaagtaactgtttaatgaaaatgaagtatttgtatttctatttatcaagaaagaaaagacgaacctgtggccgagcacgggggctcacgcctgtaatcctagcactttcggaggccgaggagggcggatcacctgaggtcaggagttcgagaccagcctggccaacgtggtaaagccctgtctytgctaaaaatacaaaaattagccgggcgtggtggctgatgcctgtaatcccagctactcagaaggctgaggcaggagaatcacttgaacccgggaggcagaacttgcagtgagccagattgcaccattgcactccagcttggggcagaaagaagagaaactcagtytccaaaaaaaaaaaaaaaaaaaaaaagagaaaagaaagaaaagaaaagatgaacatgtaacttacacaaaacacttgttgccatttaccatggggatataatgaactaacattcagaagtcacacatatgctgaagaagcatcaggatctacttcaaaagttaaaaacattaaaaaaaaacacagaaaaaaagagtgcatcttaaaatgacttaacacacacaactgcagaaggtggagctacagaacatgcttggaagcacgactttttatttagatcagatgattgttctttgacattaagttagctcattggcaatttcatgatttcttgtgcatatcccaaaatgaaatgacacctgttaaagtgccagcaccgttagcaaaagaacatttaaaacagaaagtggtgccagttttatttcaatgtcatcagatgttccaaacagaaaatcactccagttaattcttgtaatggtttcgttttctcatccaattccgaggaagaaactaaagctttttgaaattaattctgttgaatgtattattcatactattttaaattcagttaatatttagcctacatttctagcatttgtctaatattaacacagtttttggtggagtactgcatcatgaagaaacctaacactctgaaatttaaagatacgaaatttacttggaaatagtttttatgtacatataattcatacttacatccaaataaatgttgatagtctctcaattaaaataaaagctgtaagtttcaaatttttgaaataggtacatatacaattggatcatctgaactgtgaaattttgttaggaaggtaatgttgactacaaaaaaaactcagaatatcaggattcactttttctctctgctgcctttcttcggttggattttagaaacgttcatgagtgtttaatcttctgtgcttttaaaattcttctgagtgtcttaaaatagtactgaagttttcatgacagtcttttcatttttggctgaatattgttttaaaatcatctagaaatctttcatcaaagtaccagtgaatggaacagcaaaagctaaagatttcaaagcttttatcaaaatgcgattttcgcaaacaaattatgaaaataggaaggcatggatatgtatctgcaaaggcaagggagaaactaaagaattgtagaataaagctcaaatattataaaatatgtaatttgaaaactccaattgtgttttgaaatattcagtttgtgggaataatagtttgatgaagtttcaatttttaattaaataaatttatatagagcagatataatgaaattgaagacttagtaaaactttcaaaaaaatcctaaagacagtttatttgatgatttttgacttttaaatatttgttaatgaaaagtattcttagtaaaaaaaatataaaatatttgggctgaaatatttaatataaataattgaattgaaaatattttctgtttagcacaagctctgagcttgttaagtaccttgtgcctgtgggagaagctagtctttaaaagtttaaatattggccaggtgtggttgtctcacacctgtaatcccaggcgtgattaatttgggaggctgaagcaggcagatcacttaaggacaggagttcaagaccagcctggccaacaggagaaaccccgtctctactaaaaatacaaaaattagctggtcatggtagcccacacctgtaatcctagctactagagaggctgagaatctcttgaacccaggaggcggaggttacagtgagccaagaacatgccactrcactccagcctgggcgacagagagagactctgtctccaataaatacataaaaataaaaataaaaatttaaatattattgattaaagataagaatgaattagttttgtcactaatttcatacatattaaccatatcatgccactttgaagaagattgtaggtaatttatgaaaaatgttcaaataagactgtatttttttaaatacttttcttagaaaaatactagtgatatactattaaagacagataaaactttaaaaaattgattaaagtacttgcattctacttattttaatgttcagattgattttatgaagaatttttgcgttagtgaatgaagctttgtgttattttatattttagaaataattctagcatagcatagaatattttataggtatacgaatataataaaaccagaatgttgttcaccagacgaattcttcaaaaaaaaatacaatcttcacttttagtctactttcttactctcaaaagtatcctaattagtctagtgctgaagagtttcaaactcatttaaagagaagtagacaaataagtgacaggaaggattgccgtgtgtatcttccagtctggggtgatgtttaaattcctcagagtccacttagctttgtctcttcaccagccttggtttgccccagtgctgttcatcattttaacaaaaatagatctcacaggatgttcacccagtcacctttttgtagggacaagctttatagtcctagcacttgctgattctttaaatactgtgctttggtccaggggatgttaccttaagcccattttttgtagttagtaaataagacttcttcccaaagtcacgtgcatgttcaagttcttgcattgccagtgtgtaatggataaagacaaatgtatagtaaaaaaatcatgaggcagtctttggktctcatcccagccctgttggctgtgtgatatttggcaaattattttacttctctgagcctcttttctttccattgtaaaatacagagaatgatagttaagagtatttttgtggaaatgaaccaacacaatgcagctcaagtatcttagcagagtgcctgtgttcaataaatattaataaaatgacccttaactcccctcagcaagtttaaaaacaggaagtttccatttcaccatttactttccaattctttgttaaagatggccataataagtaatgagagtgtgcatttgtaaatgtctgtcaccaatgkgaatttacttgagatgactcaaaccacattctatactggaaaaggtgcatttaacgggcaaaagaaaagcccaggccagtttctttctgtatcaaccctgggtaaatctccttaagaaaaaattaacaatcatgatttattcatagggaaagaatttaactacttgttagcattcgaatgggtcctaaggaaactcccaagttaattaaatcagaactttcttcttgagtttgatccattatagtgagttaccagctgggtatcaactgctttcccagaaaggccccattgaaattaatggactcagggctttgttgagtctggacactagagaattggacaaatgacactgtggtttattaaagaattatgactgcaaatacattatatgatgctttctccctctctctccatttaattatgaatctgcctctcaaaagccttgactctgtattttaaagttgacataaatggtaggacgaggttactttttccagtaatggagaaaggaggagaaaggttgctccgaattttgtgatcttgttcattttccgatgaagtttttttgctggtccaaatattaattaatcgattgattgaaaatgctacaaaagaggagccattcatcaaagaaccaaatccagtgattcgtgatctggggttttatcacttatatttctagagcatccttttgcttttacaacttaaatttaattgaaattttaatccctagcaggtttttaataaygggcagcttttgagacattaaaaaacattgctctcacttcccagataaggaggttgtccagatatccttatgctttagggagcatttactaagtgatggtacttcccagcgcacatttttggttttgttaaagtatcttaaaccgcccatgtgtagtcaacttccccttatggaatccattgataaatcatggcaaaaggaaaccactctatggaaataacgtctaaaggagaccctctttatcccggagaggaaaaccagagagcagtcacaatctggctaacataaaaagaaccactccttgatgcaaatcaaaagactagatgtagctaattagacatgggaaaagggtggttctcctgaaaatctggggcctcaggcattttctggaatgtgtacagtcagaacgtgcaagttagtcagcaaagagaaaacaagcagccacacctctcccaaataccgaatagtcatccttcttttgtggttcagaggtgtttgtttgtcttakaatgctgcaacttaaaaccaattgattttaaataaaaatggtaacattataaagtgtgaaagtgtggggttaggaatcatttcccaccctgtgaaaatggctctatggtcacccaggggtgtgtgtgtgtgtgtgtgtgtgtgtgtgtgtgtttgtgtgtttaacctgtgagataagaatggtcaaccagttgactcctcaagaacagtctagattgctacaggcatgaagttgctttgagagcaggttgaatgcccacacatgtaggtttggtagaggtggtggtgaaagcggtgagcatggctgcagggtactcatgccactcactcctttttgttacctctcacaacctctctctgtctccatctgacatgcctccctagactgtctctaataccattagaaacttcagcgcaaattgtgcaacctctccgacactgaccacaaaccctttccagcctcagaaatgttcatagatagatgagggttatcagggttgctcagccagtgaactccgaccacgctgggtgaggctacatttgtaatctgttctggaaaacgggaaccatgctccattttcaacctgcactcacccactcctatttctttctagggtgtctctgtttttttgcttttaaccttgggtttgactttttccagtggacatttctaactaggaaacttgatggtttccacttagattcccttattctccaacttaataaacatcaatacatttagaatccttcgctttccaagactctaactgatttgtggccacagtgatctttaaaattcattagactttcgtcattccattttctttattaaggcatccatatgagctgccatgtgtttgctctctttcatatatctgaatttactgattgttgtctccaaaacatgttctatcttagacactatctcatcctcttctctgccagatattgattattcatacattctctgatcccaaccaccagctttactcattgttatgtctttgtagctttttcttcccttaaatacaaggacaacctattatttccacaattcagcactttttactgggtcttttacctstctaaacccaacaagagcatcaaagcatgatgttgggcttggtgcctctcttccaccattctttctctttttaactccacatgtgtgctggactcttgcttatgatcttccctgtgtagctaccaccacaaaaatgtgtccccggcctttacaaatgaagtgttcagatgcaagccattctcttatagacatggcagtaaagaccaattaaaaaagggggaaaattggtgctacaatgtcactttgcgggagaatgatgtctgtaaagtgggagcctatgtcttgcaatatgctgatgccctggttgaatagaccaaactattcattccttcctctatggcctggggagatctctctccatcacacctcagtgaagacagctttgatgcatttgactgtggtgccttgggcctcccagttttcaatttttatttgtttttttctggtggctgccttcttgactgctgatgtgtagcttatgaaggagtgaaggatgtgccatcccaaaatatggcagattggtatattgagtatttcaagttgaaaacattggagacagtgtagtttcagaaaaggaagtctgacctgtctcttcctgcatgtagcacaccataaagattcctctgggaggggtacccttgccttaccagggcgagaaaatagcccttaattaccagagacttggaactggaggctacactggacctgatatatacacttaacaaagtaacgcttatgtgcctgtggttttacacccccccaccccaaatatctcctagtgactcccctagaaaatgtactgccctggccagattttctttttgctgtcatttcttctcaaatgtattatcattcattgwctaaaaaatataaaagccccttcttcagacttcactgtcttgtgaagatcttcatgtacacgtgaaattaatcaaatgtgtatacttttctcttgttaatctgcctggtgtcgatttggtttctaggtcctgctgaggagcccactaagagctaaaaggaggattgggggtgatcactggctctcctacagttatgccctattgttttttttctttaaataccttttccaacaactcgaagctcagcagtatggtggacttcctcccttgtgcatagatattgttgcatcatttctgtcttccagagaactacacttgctaagttcagaatactttatcagcttactttgtgtccttgttcccatggtggtgacaccgatcttgaagcttaaaaaatcccccaaattccgcctcccacctctgtgacactcttttgcaaaaatatgcaatttttctacacacatttctgacaaaaaggaaaaaaatgttaagtccaccctagktctgtccagacaagcacagagagaggcgtgttagatttccagacaaatattttcgcctagattttgctcaatgaacttgattcactgcagggctttttttcccacaagcgcgtggcagaggtgggctgccacaggagtggccagtgcccgctctctgcagggcactgctatgaatcaccattttcatgaatggaaagaataggaggaggggaaaaaggacaagcagcttgttgctaatgccctcaaacaaggcaaacattttgtgaataatttttagataatatatgacggtttggatctttggttttgttgttttgaatggaatgcatagaaaaaagaacttgtttcaacaaaagtttgatctgatatcctattcatgggctgattctttctcaaatatttggcagctcatccagggcacagaaaaggcacagtgttgaatcatgttgctttcaagctctgtatcagtggaaggcactggaagggattatcgatcccacaaaatacacaaggaaagtatgtgcccacttcatttctgaggaaatttagggttcagatggaccttgccatagactcagtgtctttagtagaggccaaataaataaataagccaacatagatgccaggcaacttaccatacagcatgctgaatttcttccctcatgtctggtgactggttttatagaacccattcagtgagaatgcaggagaagtctaagaattagaaggaacaaagaaaagagaatgagcacgggaataaaagtaaataataatcatgtctattcttgattctggggactggctaacttctgtcactttaaaccacttcacctcatttgaaagtccaggcttctcagcttgatgtccaaggttctccatgacacatatcytcttgagcacttcacttcatgccccgaccaagcttggacttcttccccctcacatgcttgctgtttcatgtttcatgttttagctcatgctgttccctctacctggaacatcttggttcactcaactaattctacccatcagaatttagcacaggtgtcctcctctcttcatggtcttcctaaatacctcttgggttcattattcctcttccatgttcatagatcaccctgggtattactctgtgctagcactttccttctttctgctatgtagtaccagtcaggcactcaggggaaacgactatgccattcactcattcagtcattcattcattcattcaacaaagacgtattggattactattatgttccaggcactgttttagggactgaagataaggtggtgaacaagacagataagattcctgttgtacaggagtatgcattctggcagggggatagattaaaagggaaatcaataagctaacacgttaagtgctaccgataagatgaaaatatgtcaatgggaagaagagtgcctgctgatttagactgggtggtcaggcaaagctttgccaaagagatggctgaagctgagagttcaaatgcaagaaggagtctatgaggatctgggcacggagtgtctgagttggaggaaatgcaagcacaaggccctagaggaagaatgagaactgtgagctcaaaaacctagaataagccatgtgactagtgaacagcatgtcccagcaaaagtcacacttagaaaatatagggcctgagggtcacaggaaaagttgtttattctttacctgatgggaaaccttgggacaattctaagcagggagttggaagacgtgatttatattttgcagaaatcaccaaggctctgcatgctgaatagattttttctttgcatccccagaacctagcacaatgcctgcctctgtttcagtagggcccagagccgtgctgcttttccacacaggaaaattgccttttccaaggtgcatggctgcccagtagagaggaaagctcaaagtcatatcaattcaacacgcagtactaagtctctcctcttgctccattttctactggcctgtgaccaactacttcctaaagttgaaattgcttccgatttcttttttctctatttcatggataatccatgcagtgtttgctcaacctgtttacactgagatgtgttgaggaactgtcccacggcaagaccacaaggtggggcagtaatgagtaattggaagaaaactgcggtaccttctaaagctcaaatgtggctttctagaacmcgatgaagtggagccctacattcattatttgaccttggttgttttttttttttttttttttttttgagacagaggagtctcactgtctcccagactggagtgcaatggcatgatctcggctcactgcatcctccgcctcctgggctcaagcgattctccagcctcagcctcctgagtagctgggactacaggcgcaagccaccatgcccagctaatttttttttttttttttttttttttttttaggagagacgggatttcaccatgttggccaggatggtctgaaactccggacctcaagtgatccacctgcctcggcctcccaaagtgctgggattacaggcatgagccaccatgcctagccctgtgactttttctcaagggcttcaaacagtccctctgcaagttaacctaggcatactcacagagcaagaaggcattcatgataccacaagggaggtgaggtttgtgccatttgctccatgtcactgaggcaggacagccctgtgtggctccattcccacgagagaccgtcttgctccgttaggactgcctcccacctgctaagggtgcttttcttccatggtacagtgatccttaatcatttgtttcaaaaatgtaccaacctcccgggaatgaaactaaccaaacttccctccctccctctctccttcccttccttccttccttccttccttccatccttcctgtttgccttccttccttccttttggattatgttgtttcattaaaatatatttagctgggcatagtggctcacacctgtaatcccagcactctgggaggcagaggtgggcagttcacttaaggtcaggagtttaagaccagcctggccaccatggtgaaaccctgtctctactaaaaatacaaaattagcygcgtgtggtggtggacgcctgtaatcccagctactcgggaggctgaggcaggagaattgcttgaacccaaaaaaagcagaggtttcagtgagctgagatcgtaccactgcactccagcctgggcaacagagtgagattccgtcatatatatattcacatgatttaggaaattctgtatttcagcatcacagtataaagacttaagttctaagagttgatattgctgtagatgttgggaatgraatcttaggagtaacctttaccggaggcaacttctactgcccttgctacctttggtgtgacctgaaaccccctttcttcattagtaccaagtgacttgtttgccactactcagctgtcccagaatagcttgactccacacatccatgcatttctaggaagaaattaggtgcattataaataacgagtcctctgaaaatgccgaagtgtcttaatcttttgaaaaaaattatctcaaatttacattcacaaggagccatgtcttttgccactaactgaaactcagtaacaacactgaagtatgagcttgggccttgtctgacaataaaaaggaaatgctaggtcccagggaccacttcaagatgtgcttgttcctttaaagcagggagttgtcacatccaatttttaacacatatgtatattttaacacatatgcatattttaacacacatatatatttctgattatactgtaaaactggtaaattatttttaaaamatcataaggcccccaaatcccagagaaagttgtttctattacaattttagtctatttgtctcttttaagtttctcttccctctgagcatatgtatctctaatgcatgtctgcttatgtaggcatatttatacatacaccctttcttttacaaaactgatatcaatttttgtattttaaataaaatacaaatgttttacattctttctaaacaagcagacactacttttggcacctcccaatgctggccaggtcatgttaactacccttaatcagctttttttcttgcaatatttgtaatatgcatcatctcagggcaagagacaaattagatcatttgaagattaataaatccttacctctgtttggttgcacttagccagcaaattcatcacatgcttagtctttgctttattctgggccatgtagactagctgttaagtggaaaaaaaaaaaaaattcttcttcggggcagagtggcaggatggctctttggaaagagtcttggagcaggagtcaaatggtctggctttacaccccagctatgcttacaaaagctgggtaacttgcagttcccttaccactaaagtggaaacatggatgtctaaagcttttttacagctagaaaagtctatgcttggttagcattgtgctgatgcaattctgttccagataaccgagggagggaatggcggtcctcgcgtgaagacgtaagtagacgtgctattaccctcctcggttggctccagcaataagcctaatgacctctacaaagctgttctgtaatacagaagtaaacacttactctgcacaatttctccttgcatgtgcttcccactggtagaacattattcatcttgttggtctttccaaagagattcattacttccttgctccttcttattcatccttcataatagaaatgctaaaagtctgaaagaygaggaagggagcacatttcctccctgcagtctgaggaatggctgtatctcttcatgagcaccaagaggaagcccccagatgggtccctgtccttacagccttgtttccatgtgcatttccaccccagcctcttccataatcgctccccatctctatgccccagcgatgccagttgttccatcaaacactgtcctctctgttctcagcctcggagcttctgctccctctgttaggggtgactgattctcaccaccaccaggctaattctgactgttctggtttcaccgcggatgtcacctcctccaagaagctcttctcgactttctgcctgcagaccctcatctaagctttcacaacaccctgtgttctgtgtttacacccacccaactttttcttttttaaattttattttaagttctgggatacatgtgcaggacgtgcaggtttgttacataggtaaacgtgtgccatggtgttttgctgcccctatcaacccttcacctagatattaagccccacacgcattagctgtttgtcatagtgctctccctctgcccacccccctgacaggtcctggtgtgtgttgttcccctccctgtgtccatgtgttctcattgttcagctcccacttatgagtgagaacatgctgagtttggttttctgttccttatgttagtttgctgaggatggtggcttccagcttcatccatgcaaagcactggatatcattcctttttatggctacatagtattctatggtatatatgtaccacattgtctatccagtctatcattaatgggcatttgggttggttccatgtctttgctattgtgaatagtgctgcaataaacatatgcacactcaccgaactttgcttcactgtctatcagaaaactgccagtttttcagttgcatttatctcctagaatataaaggctttgaatagatccaatggtcttgtttaccattgaatctgatacctaacatggaatctgacacctgctagacaccctcagaatgtctgtgaaatgatgtaactctacgtgatgtgtgtctactcatagctgtaaaatgagtgagccctcctgtaggtcacagtgtccagcagactggcagggacctgatatgaacatcacagaggaaaaaaacacatacgaaacaattaatgcttgccattgggccaaatgctttgtatgtgttatttcatttatatttttatttaatactaagcagacttcatgtaccctgtattttgctaggcagtggagtacatagaaaggaacagaaactgcgtatcttgtcttcccaactgaaaggagacgattaacctacttgaagatgttagaatacaaatacatgatatctgaggacagggtgaagaaaaacaaacaaataagaacatgaaaaactgtgtttgtcttgactattcaggatatgaaagtgccgcaacattcatgtatctagaaactccatgaaggaatctacacttagggcttaaagaatcctaagggaccgggcgcggtggctcacgcctgtaatcccaacacattgggaggccgaggtgggcagatcaggaagtccagagatcaagaccattctggccaacatggtgaaaccccatctctactaaaaatacaaaaattagctgggcttggtggcgcatgcctgtagtcccagctactcgggaggctgaggcaggagaatcgcttgaacctgggaggcggagggtgcagtgagccaagatcgtgccactgcactccagactggtgacagagggagactccatcaaaaaaaaaaaaaaaaaaaagaatcctaaggattcctggttcctgacaggtgcttgttccttgaagtatacttgtgccgggaagcaaatcttctctctctcgttttgaacttggaggagacagcagctcccttctccttttcatacaggttattgtttataagagcaatgtgatgaaagcttcctctgctaagactgcaactccagcgttaccttttctttacctcaccttgatcctcggtgtgaaacttcactcattactgatgcattgcaattaacagatctcctctttcaagacacattagggtatgttctgactatcagctccaaaaaaataaaataaaataaaataaaataaaacacattaggaaatttaaatgaattagtgtaatcagctgagatagtacttgaaagggaccgtgtaggcttgtggtggaataggtactttcagacagaagtctctagaatattcctgaggaagtattttctcctgcccttcaatgaatagagtggtaaggtttgtgaaaagcaggcctctggcctgagttagggaaattatatattgtttgtccaaagtagtaaactctgtctaaaatgaaactctagactagatattattttttgatgttagatgtatacgttctctccatgatttagcagactttccagggaatgatgagtctcccctctactgaatactataaacatgttatctcagtgggaaaaatagaaagagatccagagaagaagagggaacatcttgcttttgaagcatctctgcttacgagtccataggaaataaattacatttcccagggttctgatttggtttttaataacttactggccctgctaaacaagacactcaggagaaagtgcatgtgaatagatggagatctacatttttagaaaatatgtttctttcttttgggatcacaatcagaacataggcatcattgaaacaaagccgaggaagaagaattttctcatgctatgcagaagttttctgttaaagatatcagaggctttgcaccctgagagctgtaatcttctctccttgagttcttcattgagatttactgcagaggcctcagatgtgtttatttctattatccagttgctcctaatattacttgcaattgttttggcatgagggttagaaattgcaagaactcctagctcgaaatcacagaacgtacacaaagacaaaacagaaataaagcagaacaaatgcaaggataaaatagataaaaatatctccccaccctaattgtgctcttttaaaggaatgctattgaaatgacaaatgaaggagatttctacctgttgttatatagctgggcagagtgacatttttggctgtattctagtgttgagcagttgcaaagctttctttccccctgaagcagtagagggtgctatgtggatataattgaagagatgctaagtttctatatgacgccagggcttagggactgccctctcttttcaagccacttgcttttcccaaaataactaagaaaagggagaaaaaaaatgagtacagaggccatgctagaagacatagataaaatattaagtcttaagaaaggtaggaaataatcagattctaaagttctcacaaggtttggtattttgaagtatttggcagaaggcaagggtatggaaaactttaagaaattgtaagcttaggactttatcgtaagcttaagacagagatgttatctgtctgaaaacagagggaaaattttgaacagagtgattcttgtaataagagaagacttttgacaagttatgaattccttgaatttcattattttttcttgctgtttaagtagtatatattgtatatttgatgacagtcagattttactgatagagatttgaaatatattttgatagggctacctcatgctttttgtagaatcaaacattttagagctgttcagccccttggagccattaagtacaatcttaatgtttttgcataaggagacattggcaccaagaagttaagtgacttaacctgtaacaggctggtccaaacatccgagcctcaactagaaccagtgtccttacccctggtccaaagctctctgtcttttgctaccctgctttgagttacagcattttatatgctgacaatacataatcctaatacatttatatattgttttcacttacaaagcagtttatgtacatttttccacacttatgtaccaaaacgtcctttgaaaatatgttatttgttgatttactcaaagaagacttgcccagttttatgacaggctgagaagttaagtctcctgttgcaattccgtttgcaattcagtatccattacacctggtcaatcaagtttcttattaatcccacgttttccctgcctgtaaactcccttcttagtgaccgattttgctattttgtgtgagcacttgagtaaaattcaactgactcagagtagggaatcctggctggattaatgggattgtgtaacaccttcatcacttgaggcccagataggagtgactgtgcgatgtaaaaaaggcttgccaacaccactgatgtttgacgtgaaggtgaaaagttcagtggcccagagaagtgctttaaagggttcttcttaaatctaacacctgaaggaacaccttcagattatccagcagttgtgatcccctatgcagtgtctatttgtmtagacttcttccccaacacacattccctagtacatttaaatggaaagaaaggtctgggaggttatttgcaggggtgttgatggaaacaggacccatcacagctagggtcatgttatcagagtgcagattttgaattcctttctgcctttcctgcatgactttaagtaagaaaatggtcaccttaaatttgcccaataagactcagcttggaaatcattcttgggatgcagaaggatctggtccagaaagcttcagagaagccttgagaactgcctattcaagaggrgaagaaggctgagagagggaacctgcaaagatctagcaggaaaagagtcttctatgtgcaaacaacactagaccctttcccagaattggggcactaacaaaagataatgcctctgaaatattgggaaaattgttggagaatatgatctcgttccctatgctgtcactccaggtaacacccatgatgctcaaaggatttttttaaattaaaaggagtaccactttatttaacaggtagaaaattatggaaattattataccaagaaaggacataggctaataacataaattaggcttaaggagagtttcataaattatgtatctccaatggattaatgaaggaaattaggaataatttttatattatctctacttttttacttatatatttggacttgaggttttctgcatataatatgcrcactaatataaatattaatataatgctaatacaaaggaatactctctcagagattgtgcattaatgtatgtttcagtgacaaaatatagtgcgtgaccttagccccaggaggaagaataggatatgtgaaagaacctaagattttgracccaggataacctggttttaagcccaggtctgctacttaagagctgtacgactgtgagcaagttattttaaattgctggatcttgttttcctcatttacaaaatagaaacactgatatctgcatcatacatcatactattgttatgatttttaaattaaaaatatatgccaatgaacctagcaattggtgaccatattgtaggtacttcatggatatctgcctcttccttccatgtgcaaaaggaattctggcatcatcttttataattactaggaattttttactgccttcagaaaatatttctagacttatcctgctaatttttgtttagaagttagcctctgtttcagtccattctctcattgctataaagaactacctgagactgggtaatttatagagaaaagaggtttaattggctcgtggttctacaagttgtactagaagcatggctggaaaggcctcaggaagcttacaatcatggcagaaggtgaagaggaagaagagaagtctcaaatgactgaagcaagaggaagagagcaataggggaggtgctacacacttttaaacaaccagatctcaggagaactcactcactatcacaagaaaagcaaggggaaatctgcccccatggttcaatcacctcccacagggcccctcctccaacactggggattacaattcgacctgagatttgggtggggacacaaatccaaaccatacagtccctgaatatatatgtgcagaaatagactgctcacctagacttcaaaagacatgtcatcattacgcacctctgagacattgtatggtcttggttttaaatttcttgagtaatctggttaattctgatactagcgatcaacagctttggtgtaaaggtaggtcagattggtgatatattgctacagcaatttgaggaaatcaatttcctccctaaaagttttgacaatcttgtttatttatatattttatggtggtgaggggagaaattattcttgagatcttgcttctttgaaatatggttcttctcaggaatatcctatgttattagatgatctaaaacactgtggcacttcttaaataaccaatacttaagataccatgaaaattacaacccccgtgagatatagtatcaattaaactatgccatatacctcgattggttgagttccatccactagtcaatttcaaaattacctcgtaaatcactaagacaataggaaagaaagccttactataacttgccttactataacttgtcttactcccaaatttagcaatatctttttagcttattgatggtatttcaggaaaatcaaatgtagttccacattataaggatggagacatgtgttacctctttatgttcctgtatggcaaattagttgatactctttggtcttgtcgacatctctttaaccttgtaagattataaaggttagaatcatgtttaccacctgtaaaaaaaaaaaaaatctgacagcagtgggttttttttttttcttcttcttctttttctccaccacatcccctgataatgatttccatgggctggaaatactgggaggagagaaatatttagttgaattcattttaaatgaaaccaatagcttcactagtgatctcataacctcaaagcactttacaaactgagtaatcattgaagatgctaaatatagtaaatacaatgtttaaaaccttcacaaataaatccatattaaagtcttattctaccacaaagtagctttgcttttgatataccttttaaagtcatggatttcttgatggagatattgagttgggttgttcctgttgctttttgtttctttgattttttttttttctattatataagctagacctcactctcttagtcatttcattatatgtagagacaagatgctgccttaactagagctttattccaggtgcccaaaggtcttcatttagttcctagctcaattcgtgagtaaatatttcttttccagctttaaaattttttaaatgacattgtcaggcacggtggtgcatacctgtatccccagctacttgggaacctgagatgggaagatcacttgagcctggcggttccagtctgtagtgcacagtgatcatgcctgtgaatggccactgtactccagcctggacaacatagcaagaccccatctctaaaaaaaaagaaaaaaaaagaatgatagcatttcctttacttgtggagattttctgactataacatgcacactattattataaaataatagactttacaaaatataatggttgtagtttcatttgcactaaataacgataaaccttatttaagtgcaaccttattttatatatatatatatatatatacccattaatttgattgtttttaatgtagccatggacatggagagttcacaaattataatttataaatgtattaagatagaataattgcagaatagaaggatttttaaacaatttaaatagtcaccatttctgccacccattaatcctatatattggttctaggacttattcctggagttatatcctgcacattggcttcaggcatgaaggacttgatcccacatcttctccagtgggattgtggagatcgtgtcactgctggcctgtcctgcaggctcttgtggtgatcattataaaagccagccctggggtagctcaggacaggaaaggarggatattctgaaatgattttctccttttagttaacacattttggttccagaacactgagcaaatcatcaactgaagccccatgatatattttcaaagagtgaatttctcttacctgactgaggcattttattctataatagcaattctctgggttttttttttttttcatacttataacaaagcggattaatatatactcacctaaracaccaaagatactgatggctttcaccactctatctaagcaggagtaaacacctgggaactagaaatctgagaaagaggacaacacccaacaccacctaactatggccctcgatacagtcatttaacttaataaccttccgtgagagtaaggtcattatgaaatatgctcggttttacacaaagctttaaaaaaagccacataaaatagtatatgaggtcacctctgattcctatgtaaagaagattcctcctcccttccctcattcattgttctccacactctactccacacctcccctcaccctgcaatccaacttatcaaaagtttaattttccctttccaaaagcaatgtacttgaaattcctattcttagttatgtgcattttggtttcctctttgattttcctttttttccaggtttcctgttgataccaacatgaatctcaagggcttccctttgcttcttttggaaaaaaataaagaaaagagactgatttagagcctatagggtggaaaatcacagccaggaaaaggcaggcatagcatgcagcagttcagagacagggctcacccgcccatctcttccatcagccacctccctggtagggcatcccttggaacagaagccagcaatggtcctgcagggattggagaattgtgagctctaaatgataaaacgttgagtcataggttatcactgtacagagtgatcctttggcctctgccttgagggcacgtaagccattttttccttacttgttggaatttgattcatttcctctttttctcctttagctctctaatctagaattctcagtttatctataaaaggattcaatatctgggttgatcctgaggagtcaaagggttggttttgtgagcagatgggtggcagacaatagcttttgtagagatgcctctgaatgagcccacatggtggggctttgagaagcctagtgtggaatcagtaacaaagtccaccttggaataatagtaccatagtttcagtaactgctgattccaaaaatgtttcctatcacacatcttcctcatctgcctctcacaacaatcgtgtcaggagaaagctaatccaactataaagtggctacgtgatcagaaatgacaggatgggttcattgcaatgtcaagcctcagtagtttttcatcaaagccctcaaaaaaaaaaaaattccaccccaaactgattgtgtattattcaaccagacttctggtatcttcaggcacactgtttgcaaaggccaggcatctcttatgtcctgctgtctgtagacctctgtggtttatggatgggaaaactcaaacagtctgctcttagatggtccttattgcagaaagcaggcttatgccctgtaagccgggggtatctccaaatcgtgcaggaggagaggtactgattgctcatttgcttcttctgtgccttaaaatcaccatccttgttaaagaaatgcaagcattgagtagagaagtgtcttgcttgggcttgcttttgagtaccgggaattcagctttcctgctttggaaacctgagttgggatgtaggtgtgtagcaaaaggaatgggtggaggcttctaactaatggggaaggcatctctgaaacaagctgagatgtggatctgggattctgggaatcaaataattcttcccagcaccaaactttgatgagagaatactttaatgtctgtggttgcagaataaatatgattcactctgaggattctgcactgcaattgaatatgtcagaaaaggcaaataaaaaattggaaaatttatctgtaaatagttctcaatagttttagaagagcttccaaggacattaatttcttcctagccattatttattaaaaccttcaggatagcatctcattttttggccacactaatgtagcaactaagtgtgcaggccctggattcagagctaaatctgactctttcaagctgtaagcccttgagaaatctacataaatctctctgtgcctcattaatgtcaactgtaaagtgaggaataatgatattatgtattttgtaaggttgtccgaatgtttaaattagattataatacttaatattaattgaccactttggaagtgagcattgttctaaatgctttaagtatgaattttattgtcatcgccatccatatcaattatccttatttattatgctgttataagaagctttgatttcacaaagaaagaaattcaacacttaaggaggaggcatgagaaaacatcttattgaggtttttaatcatcttctagtgaaccaagcaagactgaacctttattgcaatgttttactaggctttatagcacttttaaagggtcaggtaaataaagtcataattcaaaacagctgttacggggtggggcacaatggcattgatatcaagagactctagtactgaatcagttacttcctatttatataattaaaaaatttttttgttgttgtttgtttgttttgagacagagacagctctgtcccccaggctgaagtgcagtggcacaaacgtggctcactgcagcctcaaactctcaggctcaggcctttcccacctcagccttctgagcagctgggactataggcatgtgctgctatgcctggttaattttttatattttgtagagatagggtttcaccatgttgaccaggctggtctgaaactcctgggcataagtgattctcctgcctcggcttcccaaagtgctgggaatataggcatgtgcccacacctggcctatttgtataattttgaataaatcatttaatcttgctgagcctcaaaaagcaagctttaaataaagaataaattaaaaattaaaaggttgaattaggtgatatcaaaggttcctttcacatctatgattctaaatattactcagtatttactctgtgcagaatgtctatttccacaggctattgcttacagcacaacacagtgatcatattcctctttcgtaactagggagctgagcaccacgatgctggctactggcagagtttatccctcagcccatattaagtctagaaatgattttgtccaactgatgttttctcttcacatcagatgtcacttttttttttttttttgatatggagtctctgtctgtcacctaggctgggtgcaatggcgtgatctaggctcactgcaacctccacctcctgggttcaagcgattctcctgcctcagcctcctgagtagctgcgattacaggcgcacgccaccatgcccagctaatttttgtatttttagtagagacagggtttcaccatgttggtcaggctggtcttgaactcctggccttgtgatctgccgaccttggtctcccaaagtgctgagattacaggtgtgagccactgtgcccaggcttttttttttttttttttttttgagacaaggtctcactctgtcacccaggctggagtgtagtggtgcaatcaaagctcactgcatcttcaacttcctgggctcaagccattctcccatctcagtctcccaagtatctgggactatatccagttatttaattttaaattcaccacactcagctaatttttgtattttttgtagagacatggtctcactatgttgcccaggctggtcttgaacttctagcctcaagcaatcaatctatctgccttggcctcccaaagttctgggactacaggcatgagccaccacgcgcagccagccatcacatttttagataaaacatcgaggaagtacttatactgatatatacattttactatagcaactatagtaaagagaaaccagtgagtcctaaaactgaatttttaaaaaaattagaaacatagagttaaaattaagattatactcaaagttcttcagagataagtattaaagtcatatttccaaacctttaggcactataaagaattccataaataagaggttatttaaaattaaaaaaacctatgctcaagcaatatctttgatcataagacaattctggcaatgagacaaattcttgaaatctcaacaacactaacatgggctcagatttttgctttcaataaatagaacctcatcaaagaggtcttggaaattctgctagtcaatggaataaaataatgaatcggatagaagtcctccagccctgtgctggaccgaaatgtctctgactgcctgtcatatttcagaggatcgtgctcctcagagcagtgtggggctggcacagagatgaaagaaagaagaggttcctccctggtttctgtttatttgaacctgaatcagaatagagaggaagcaaaggagaatgaatggtgtgatccaacttttcttccatatgtgaacaatattgacttatatggcataattatgcccagatgctgtcgtgacagggtgtagagatttctgacttgcataactgaatatattttttaaagacaacaaagaaaaagaaatcagtcacaacattgctttagcatcttgagtcttggagtgcttctgccatggaaagttatagtctctgctcttttctgcttagactgtatcttaaaactagcttcaatattggatggcctattttaagggagatcctgacacttagtatccaaattacaaaagatgactaggttactgaggatctgaagattgtcccatataagttatagttgaatcttctgtggaagtttaacttggataaaataagcagagaaatgacaaatgtgttcacatatgtgaagatcatccttgtttttcttgttttgttttgttgttttatattctaggaagcacagtggaatttgaaagacagactttagatcaccatattggagacctttataacaattaaaacataggaatggggcaggaagccttattaggtggtgagattgtgagattcctctgctgttgatggagactagacagaggccagatgaatgtgtcaataatgttgcaagcactgcttccatattggctagaaatttggaaggttagaaaaagtcaccaactctatcatcataagaaaactgagttgagggcagaaagtaatatgatatctgggttttggggaaaccagttacctctcttcaaatctttaatgtggaaagaatgaaaccatcttagacctttttgagtacagaatgacttgaagtcagaggaaggagcatggcagacacagaatgtcccaaattgagacagcatcttttaagcaaattgttgtccctttgggtagagtgggaataataatatcgcactcacatttatctcacagatgctgtgagggtgtgtgactcagtgtttttaaagagctttggatacctgctgtggttaatgtgtcactcactgcgaagctttccaaggcaattattttgatcagaatgtcactcagagttagtaggctggcttcatgaatcatttggggagggtagtataattcaaatttgttatgtattgtcaaacatttaaaaagaataatagtataaaacaaaatacttgyttttacactaaaatttaacatcttttttttttttttctgggaaaatagaatgttgcctaaactgaagtccaaacaactttactttttaccttttcaaatatccatgtggcatcaagccaggccatttaaaatgacatccagttatttaattttaaattcattttgtagaaatcccacctctctggggagtatgtacagcaaaagtaaggccatcacaaaagctgaatgtcccaaagtggtgctttttagcagaaaatgtaatttttttaagatgaaacttgccttcagtgttcttagagagtgggttccatattggtttctgaaggagagtcaagcctggtctccacagtgcactaaatgcagtagggggtcaagcaaatgatgggaaaagcataaatcatcttggaattatagattcctctttgctgtttgactttaaattcaccatctgctggctgaatcttgatgggagttgaacataaacataaggccagtgcatgactgtgacgtggaaggtggaagaaagttccttctgacttgttaaaacccttaaaatctacacattattattattataatttagacaatgtctcactctgtcacccagactggagtgcaggggcacgacctcagatcactgcagcctcaacctctccagctcaagcgatcctcccacctcagtttcaagtagctggcactatgggcatgcatcaccatgcctggctaattgtttctatttttttgtagaggtgggttttccctatgttgcccaggctggtcttgacttcgtgggctcaagagatcctcccacttcagcctcccaaagtgctgggattacaggtgtgagccactgcgcccagctgacatctacagattatcatctattattcttgtatttgttaaccatgatctcaaaatgatttaattataaaactcaaaccttaaaggacaattggattccaaaatgtagattatatgtagataatatttctgttcacaagtctaggtgtacattagtatccattcagaaaagtgaaaaaaagtttaaaagcatttttaaaaacatgatgaaactataacactcaaaataatgtgatgggggataaaaggcagttgattgataaatgagtcattgacaggtcaatgctgtaaaaggccgagtctaagttgatggctctcagtcctggttcgtcactgctgttgtggaacttggcaacgagtccctcttgggaattataggcttagcatcatgctcttgctcgtattagctgcttcttctatcactctttcaacagtaacatattaaaaacaaaaacaggaaaaaaaaccctcaaaacttctcaggtaagtagtattaaggacacaaaaatatttcaggcttgatttagaactacatttatgaaagtaaactacgtgatatagagcaaaaccacaacctttaggttttggggggttttggtcttatttctctttttaaaaataagagatagggggtctcattctgtcatccaggttggaatgcaatagcttgatcacagctcattgcagcctggaacccctgaccacaaagggatcctcccacctcagtctcctgaagctagaactacaggcatgtgcctccacacctagctaattaaaaaaaaaaaaaaaaaaaaaaaaaaaaaaaaaagtgtgtagggaaggggtcttgctgtgttgctaatgttgaactcctggccctaagtgatcctcctgccttacctgggattacaggcatgcaccttgtgtctcactaatagatttgctttctaggtctttcctgtcaggtccaccaatattttagatggatggagcacttgcattagatcaggagtcaaaattctattcctgaatctattacttaccagttgtactactttgaatgaatggcttaattttttagtgactttgaattgttccagatataaaatgacaggataggtctagagagttgccttagatgaattaggaaacagtttctgagatagagatgttagtgcagtaggtttattggggagtgttctcaggaatgcctgtggggaagtgaaggatgtggaggaggaagatggactggaattcatttgccagagtcctcagcagatcctaccagctctagagctgggatggcccttcagagttatcctgatccacaaggggtcagcccctaggcattcataagtcactttgtccagtcattggggttgaccccaggaaaaggtatggtttggggtaagaggactcttcagttgagggtagttcctaggaagctagtgagctatgagttggcatcaggcaacatttccagcaatttggtcaatgagttccccttaaggctggatctgggccacggaccatggcactcactgccatattcacagcgtcgttttcagtgtgaaattctactgtgttaaagtattgtacagtcactgaaatgagagtatttttatatttggctacccatgacatttattctcttctgattatattgtttctctcctgatctagagttttagattgttttgtttgttttgttttgttttcctgtacttttctgtctgttgaggaaaaagagttttattcttctagtatgagagtttctattagtcctcctttttagacagatgaacaccctgtgacaattccttttgcctttttgtggcgtgtaaaaaaaaagaaatccataaatagagtcgttacgcaagtcttcatgagttaatttctctctccagttttcttactactttttccagttttcattttcttcaacagaaagcttcttcttctggctggacacagcggctcacgcctgtaatcccagcactttggaaggctgagggggatgtaatcccagcactttggaaggctgaactcctgagttcaggagttccagaccagcctgggcaacatggcgaaactcccaactctacaaaaaatacaaaaaaaaaaaaaaaaaaatagctgggtgtggtgatatgcccctgttgtcctagctaaaggggaggctaagctgggaggattgctagaggctgggatgttgaggctgcagtgagttgtgatcataccactgcactccagcctgggtgacagagggagatcttgtctcttaaaaaaacaaaagtttcttcaaattgcccctttacaatttaatatgcatgaacacatttctttacaaagagaaggttatcttttatctatattcaaaatcatatgccctggggatctttacatcacaatgcaaataaatgttgagttaaccaaaggaagtgtgagtaacaagttagtgactgggttagggggtggttaggacagtggcgtgtgattaagagatgaacatctcagaccgatgcttagtaaaacctacagggggaagcatgatgacctagccttgaatatctcatttaggaagttacacacgtgtctgggcttttcaaaatgtttgcatgccattaatcagcatcttacatcagcttgctcaatgaatgatgactatgtcaaatggaagtaaaacatataaggccagagaaggatgaagggaagttttttttaatgcagtaaaggataaagaaggatggaagtggccaggagtggtggctcatacatgtaaccccaacactttgggaggctgaagtgggaagatcacttgaacccaggagtttgagaccagcctgggcagcatagcaagaccccatctctgttttttaaaaataaaaaaatataaaaaaaagaaggttgtaagttattcaaacccataaggagttcagccaatgtattgaggtttcacactttagatatgatcaatttgctgtctttggccttaaaggaaaaacacaaacacagcagcctcgtgttcttctcagacattggtttctcctcctttcttcctaagacagctcttttcccactttctctctggccaagtccatgctcagcattgcgtgacttcactgttagtctaggtttattctgctctgggaagtttccctgacccccttcttgacagctgcagatcctgtcagtcacttctctgtgtgcttcccttgccttccttgtagatttttattacatcaattaggatacaccattacaatgcattattttgtataataaacacctgtatagtttctaccatatgccgggcactaatctaagtgatttacaaatgattattcttctgaccctcatcacaattctatgagagcagtctattattttcaccaatttatagaaaaggaaactgaagcatagagaattgaatacattttctttgatgtcatagcaagtaagaaaaaaggctaggattctaatccagggagtctggctccacaacaggtgcaattaaccaccagaccgtgaggcctctctgtcatatgcaagctcgtctgttttgctcagaagactgtgttttactcactcactcccaacttcttatggtaaaaattgctttttaatgatttaaataatacatgcccatgtaaaagttaaatcaatgactaaagcattctgaagaaaggaaaggttacctggaatcccatgaccctgaaataaccatcattaaaattttgttctttatccttccatgcattgtttaatgtaccacctacccacacccatacacagtaattaaatgggacaatataaccatttttttaaagaaggatggacatcatctgctctcatcctaccagagttgtctatcccaaaaagacaggttaaaaatctatgtgttttttctataccttttattctctcataggcttgtatctctcatttacgttaatggaactcattggtgtttcaaaaacatgatcatcttaaatgtactcttttagatgttgctttgctcactcagcagtcaccccatgtcacctggcaaagccctaatttatttttttcactggccacgtgacattcattccacagtgtagatgtatcacaatgcattcaggtattctcctatggtattaacttggcttctagaatgcaggggctgtctttaaccctggtgtttgtgacattgtgatgggcataatgggatcccttgaataaatatttgtaaaacatggatggaagtcagattttagaaagaataaattagttttttcttaattatgcatggatatggtcttgaatcggttctcaataaatcaaatttcagtaagggactcacttaaatgtatgagaagagacccctgtaatcaatgtttttaaagttaaatgattgtcttttacattttaactggtgtaaaataactaattattgttccaaatagaatttttgcttaaagatacgtacaatggaacgttataaaaccacctatatttacagataccttgtgctttgtgatctggcttgtatttttcctgttcctttcctgttaccctgtgtacgaaatgtatgttcttcccataaaaaaactaaactacttccagttgtgtaaacacaacagattctttcagaccactatgccttggtgtatgtcaaccctcagctaggaataacatttccatctctgtgattccattggcaatttctgctcaccttttcctaggttgaagtgccacttcttctgcaaaacttttcttgaatctcctttcctgttaccctcctgcacaattaaaaacttgcatccatttgatcccatagaatttatgctgtacttacatgacaggtacttacatcttttattttaactcatttatatcacttacaagactgtttttttctttaggacttggaatatgaccttttcatctttttcactgcagtctttttagtgtccagcatggagaaagtgctcaaaaatatttgttgagtgaatgacagtagagaaaataaaaatgtcctggattggaatcatgaaaactgtctacttatctctaatattaaaaagctcagtgtaatcttagaaaaaataatctgagagctctgacactttccagaggccacttccacgggaaaggaggagcaaagtctctgatcagaagttgrgtaaatatcctctgaggtccctgattatccagacattgacaaaagaaaggctctccaaggtttgccattattactataaggaagtcccagctcagatgattcatagttaaatatttgcatctcctctggctaagaaaaataaaagccacgacattccagagcctttaggcatgtaagatcttggtactttcccagttattgctccttagaaaccggtaactgaaaaggccctgtttcagaaaagcaagatatgtcaaatgggaaggaagtagaatagctatctggttggaattcagaaagtatatcaaggccaacaatataattgttgaaattggttattaatgttttgatactgtgacatatctgttttctgttctctaccacaaacaagaaagatgttgaaatatggcaaatgttatgaataacaaagaggaaaatacaaataagttcttttggcaaatctccgtagcaggttgaactcagactcctttaatgtcaataaacaaggctcagagtcaatgccactttctttggtggtcactttaagtgtatttctcttacaacagccctgcacgtccagtgttattattactgcttcacagataagaaagtggaggctcagaaaaataatgatccataattgatatagtggtatatatataatttatatattataccataggatttaaactgaagtggtaaagcaggtggtaatttgcagagaatgattttggaaatgctccgtagatacctctggctctaggcatataaaactattttcttattaactgaaaatttacaattacaacttgattcttgtggtttaagacaatggaggctttctacatggtgcatgcaaattttcccaaaatctttcccaaattcatttataattcagtgtgggtgagcttaccagttcctttccagaaaacaattgtgattaaggagttcacacagacaattattctgttattctcctctgtcctcaggtaggcagtgctcctcgagctttgggtggcaatccttcaccaatccattgtcagtgtgggtccagcttttcctccttaggccacaaagatagagttgctcatattttatttccaaaatatagtgttaggggcctgaaggccacaaagaagactattctgaaagctcccacactgacatcctccccagtactggaaaacaagtaataaaagagtaggaaaaaagacctcagggccttgcacataataggccttccataagtttatttcataaatgagattctgcttgacggactggcagatggagcctgagtttatagtcctgtctgttattaccttgctttgggccctgtcataacacttcctctcaaacacgtttgaaagaaatgcagcccaacataggccgtctcctcgctgtgctgagagggtcttgggtctcacaaagcaacacacacagccaggtcatgtctctgagcatcggatctagaaaactacaaagccaggaagacatggacaatgctaacatcctccctttgtccaccacatacatgcatgaaaacacacctaccctcactctccacccacccacacacacacacactggaaattgtatcatacacacaccggaaattgtacccaaaggacgctattactaactatgaagcaagtggcacccatggcttgtccagagaagacacccacagggtcagacttcacacaacaagcctatgaatgggatagcccacatttaggagtggwcttctaatccagaatcttctctttatttagttcaagataacataaacttcctttttgtaaatttgtccatcatccactcccttgctcttatactctagtgagggggaggtcagatgataaatgacaaggaagatcatttccagccgtgatgagtgagatgcggaaaacagggcagccatggagcagcgagagaacaaccaggtgtggtcaggggattccctagtgaggtcgtttccaaaaccctcatgggtagacctgaggctgtgaggaaaagaggaatccaggcagagagaatcaaaaatgaaaagtcctcatggcaggaatgagcctatttcaaaaaaaattaaaaaacaaaaaaatctgggtggcttaatgaaaaagaacaaagagacccaagaggctagtcagtttcgactggtgcttagaggccatggtagagtggacatttttttgtttgtttgtttttgagacaaagtcttgctctgtcacccaggctgaagtgcagtggcacaatctgggctcactgcaacctccgcctcccaggttccagcgattctcctgctgcagcctcctgagtagttgcaattacaagtgcccgcagctaaacccagctagtttttgtattttcagtagagatggggtttcaccatgttggccaggctggtctcaaactcctgtgctcaggtgatccacccgcctcagcctcccaaagtgctgggattacaggcatgagccactgtgcccggcctagagtggacattttattctacatacaatgggaagccatttgagggatttcagcaaggagattacatgatctcaatggacttcttatttttctttaattttatactttaaaaatttttgaaacaggggctcaccctgtctcccaggttggagtacagtggtataatcatagcccactataatctcaaactcctgtgctcaaagctatcctcctgtctcagcctcccaagtagctgtgactacaggagtacacaccatgcccagctaatgttttaatttttttgtagagatggggtcttgctatgttgcccaagctggtcttgaactcctgagctcaaacagtcctcctgcctcagcttctcaaagtgctgggattacatacatgaatgcacctggcctgaaagtactttttaaagaatactaaggctattgaatgaccaggtggggtagcagagaggaacactgtgagtctgtggcagtgtctggataagggattatgtaagtaccactaagatggctatgttgaagagtgagggagcatttagtttgtctgttttataagtagaggccatcagacttcagaggaattcagacttaaaattcatgtgcctttgaatggggaccacatacatgtcacatcacactaacactaatgtttcattgattcattctatcccttcccaggaatcaaattctgattaagagaaagaccctaagtggctgaaggaacaaaaagagttattgcaaaaaaaaaaaaaaaaaaaaaaaagctgatgcagttaggaaagggaagcctgagctattaagaaaaacacattgcttcttacatagtagtgctaaaggccaagcctgcatatccctgcaatctataaagtctgttttctctgacagtgtcagagttggaaagatcaataggtgtcactcacaccattcatcatctcagaaatgagaagatttaggaaaggagattgaaatgacttatgtggggtcacagaactagttattgttgagaccaaatttagagtcttgtctcctggatctcagtattatactttaattatttcttttttaacatgtaacccaatttgctcctaatagacttggaatacacagtgcctgaaatgtaaagatgacttactcttggccttaaggcatcaaatctgccacacgaaattttaagataagcataatacatcattggaattactcctgcttcttgtacctctttcacatgagttaccatgaagtgaactctatcttttatggaggagaggatatggaggagcataggagaaaggtaccatgtgaaagaataaataacgtctttgccttggactaagttgcattgcagttatcaccggaagttgacagctttggataataagcatggatcttttttgtctttgttggagcctgttgcccttcacctttatgtaacatctaaattctttattctggttgacatgggttgctttacaattttaacttggcatgtgtcatacgatcataggtataatattctacagttacaaaatatgtttgataagtatgaggcattcatgctcattgtgaaagccttcaaaatgtctgtacgctaggagaatggtgaaaaacaagcagtcaagtgagtctcagtgggttgttttctcagaccacgtggactctcttctcaaatctggtactggttttacgtgactttggagaatcttcattctgaatgagccccaaacttttcagtaaaataaaaaaaggattgatattttatgaaacatttttataccctaaaatgcagaagcatgttagaaatatatagttgctatcagtcttcaattaaatgtttaccacttggcaaaaatgatactttggtaaatccaaacatgcctaggtatccactctgtatactccggagaatgttcctatttaagcttattattgtcttgagcattaagcatctcacatcagttgttacatctggctttaagtctccaatgagccctggggaactcaatcccatcaaaggaatttcgagaggagttcacagctcctatctaccatagaagggagaaacaggataaggaatagatccctgataaagcacatgaacaaattaaatccattgttaatttgagtgactggcatagagaggtggcccctacaaaattstcactttttagagtcacggtggttcacagaagaatagaaatcatcttttcctcttaacattatttccatgtactacagttccctctccctaaagtggtctacttgcatttgtcaacactgaaagcaaaaacaaagttgaatatacacccatggtgcatattgttaataaagaagatggaggcaattcagtggtattctaattgtaatgataaaaacttacctatttcatcagttcctctcctttgcccctaaaccccaaatactcactttgtctcttagatatcttgaagtagagttaataactaacgagaataagcatctccatccatgaaatattttaaatatagtagtgtggacctaaaaagatagtgaaattggataggccatgaatagaacaagtcctcatgtcataggcaaacatccagaaagttgtgtgttttgcatttgtgttttgttgtttacatctgttgcataggaatgatcatagttacaacagctgacatttaatgaggacttttcatatgttagacactgtgctaagagctttatttacatgctttatctaatttaatctgtacaaccaatttattaaatgggcattttccagacaaataaaatgacgtttagtaatttcattttgattgcctgtagtcacagccaataagtattagagggaatattgcaacccagtcaactttctccagagtttatctttctgtattcctcagctggttgttggaggttgattgaaaaaccctttgtaagccttgaaatgctaaatagtctacataggaaaggcttctactattgtttctacttttttttaatggtttgtaatctcagcagggattgtgttatctaaaaatctgcttgatgaggtctgagatactggcttttagaggtcagacaggaatgactgcaagataacttgactttctccttcccctctgctgctaaggggtaaggtgggagtggttctaggacttctgccatagaactagatatgtgatggataggaaatgaaaaaatgtgccactactgcacaatgtcaagagattaattggcatttaatgaaatatctgtgccatattattttatagtgtgcaacatttaaaacaatacacatgtaaaaaataaaaaataaaacaatatgcatgtatgcatacatacacacacacacttttagctctgtcttgagctgtcatctcctggggcaggcttaatgacaggtgcaattctggcctaattcaacctcttgaaattgaaaagggttagcaccactcagtggctgctaaatcctagagggcaaaacagcctcctrtgtctcatcccttcatgactgtctcatgggagctcgatttctgtctctttccacctgctaaccagattcgattttgatgctgtaccattggtagtaaaatatacttctttctggtaaaaggagacctgagaaagtagaaatggcattatttaaaggaatttatacataccatataagttggctggatggaccagccaacaagctcaacactttgtattcattgtttcttttaatactcatttcaagctcctggattcagtatcattatctccatatcacaaagaatgagggactctgaaaaactcaagaactttcaaggtcactcacagaatacatgcctgagctgggattctaactcaaccccttaagcccgatatcctgtactttttctgctatatcaggggtcagcaaatgatagccaatgggccaaatcttacatgctgcctggttttgtgaatgtttcatggaacacagccatgcccatttttttatgcactgcctgttgctgcttttgctttacaacagtcaagatgagtgcttgaaacagaggccacatggcctgcaaagctacaacattgagtggccctgtatgagaaacacttgctgaacccaataacaatacgtgagagatgtattgttattgacaataacgaaacatgagagatgtagctcaaatcatttaactcagtgtgtctacatctttttcctgtatcttcaaaatccaacaggataggtctatagatatactgtcttaagcccagcttcttgtatacatttattttgttccaagataacgtgcagaaacccgaattccagataggtctcttataatgagtcatgtttaagagggttctattattccactttgcatttctagaacatacttctttcagaataattactttctaaacctgttcacttagcaggcagatggaaatccaacatcctttggcagagaagagagaggaattttccactcgggcaaagtgaagcactggtcagctcgtggctgaaattttttatgtcatcccctggttctacagaagactgtaaggacagaggaatgaggcatttcgccttgggatcttcagactcagatttctgagtcaggtttgaggttcctgctgtcctgtgggcagtgaggcccagggattacaccaaaggagcaggaacccaatgtcacaggtcccctaactcctgcctagttgcccaggycacataggmacaggcaggggagctggctgatctcatttgtttgttttccgtgtccgttctcaggcagtgataggcatgctatcatctcaattcttaaataaaaccaagttgtatcgttgaagagcagataaagcaaagacagaagcattttaaaaggaattttgtggcttccaaagtacaagtatagagtatttctgagttaatgaagaaataattacaaaatatttttgaaaaagtgacattttattcatagtaattcatgtaattccaactgaagtaattgatactttgtaatagtaaggacctattcgagtgaatgtttaagatactaattatatatcaattttaaattatttaatatcaaaaaggcttgaaagcagcatattttgtgtcattatgtgaattcttgctttgccatttttaaaactatttgttttctcataccccctcctctttattttttatgatgtcaaagactgtgtcagtcaagtctgtctctatgtcatttgagtttatgtttatgtgttagtgcatttttacaagttaactatccagaaacatgcacactctgggcagaataaaaaatgtctaagttaagtgaaaaccactttaaagcatggcagccaaaatagctgtagaaaagtttatgctctattatgtacaattttaatagacatgatatcttgtttcccagaatacaacagattgactatcagtcattttgtaaaaaatgaaagcaaaactaacaatcacaagagctaagatttgctggccctttgcactgtcccaggcactagtctaagtcttttgcaagtgtttcatttttacagcaacacaatacatttcctactgttgttatccatcttaaggaggaaactttgtacagaaggtttaagtagctaatcaagttttcacagctgataagggatagagccagagtccaaaagcagtctagattcttaatgccaatgctgtattgtctctccagaaaagaccactctcacctttccccttgttcttgataatacagttaaattattcatattcatagcataaattttctgtatcatatttaagaatacagttaaatattggtgcatattagaaagatttcacttaaatatgactacatgaaagtagatttgtcttttctaaaaaataaacaagcatttgttttctaaaaaatttactggcgtgcaccatttcatttcctaataattcagaataaatgaggtgtcaccgtggtccacttcaacagtagatgggcttatattcaggcaggaagcatgtcacctatacaacacagatgtgggtgattaatgaaaactaaatcatggggatgagatctttaagaagaagaaaaccaagttgtcttccagaagtgttttcagaaccccctgttttgaggttgtggatagacatgacggttttacaatgccaaaacagtctgttctaaagagaaaaagttcaatcaaccatttcacctgcattatgccgaagagctagtctttacagtcatggggctttaaaactattttgatagcctgtttgggctgcctctaaatatatcctccaaataaaaacctcagaaaatgtatcagagaaatgtacataattaatatttggcttaatatattgtcaactttgattttacatgtcccatccaacttgttaagccttctttgtggccattagtgtttactagagaataatatcatatttaattttctaattatgtgcgaaccttggagtcaggattagttgatatttttacaccttcaaatttataaacctagtatgaagtcccatctagactaacaaatgttttataatagaaatttaaatagtactccagttttgtttatgcatttgctgatggtctttcttgctatgaactttagaaactttaaatgtccrtttactcacaatacacacacagcctcaatgacctaataagcagatttgcagagccataaccttgctggcttatgtcagctcgaagtaaarggggaggtggtagtggtgaatctgtttttattactcagtgtttaatcataatgaatcagaggcttttatgagaaaccttctacatcccatgaaagatttgctgatcaaagatgtagagatttctgttttattagaaaaaattgtttagcacctcattgtggatacagaagacattgtttgttgaaaagtttaagtctttttacgctacattggatgtcacactgttctgagtttagtggtatcaggtcatcagattctgtaagatgtgattctaaaaattcagtcctagtcctaccgagtccattagagaaggtctgcagtatataaaactgtgacttaaaaaatgctcaatcttccatgcacataactgcctgatgactctcaagctcaggtgtgaccttcatagacaggctgttgtaaagtctagtaattccttcaacacaaggtaacttagtatttaaaccttgaccacacatcacttcagaattactaaaggaacttaaatatatgtcagagctcctcttcggaatataggacaatggagcttatgcagatagcattactttaattttaattgtacccatctgggttcttcgaaatggcaagtatttcgtttatgtgcctttctcatcttgggtcaactcagttccatgcactttaaaattattttaggaaagagccacatcttttttttttccttctttctctttctttctttctttctttctttctttctttctttctttctttctttctttctttctttttctttctttctttctctttcttttttgtgcatgcatgcgtgcatgcatgtgtgtgtgtgtgtgtgtgtgtgtgtgtgtgtgtgtgtgtgtctcactctgctcgcccaggctggagtgcactggtacaatcttggctcactgcagccccgacttcacaagctcaggtgatcttcccacctcaccttagcctcccaagtagctggaattacaggcacatgtcactacactcagctattttttttttttttttttttttttgtatttttagtagagatgggattttgccacattgcccaggctggtcttgaactcctgggctgaagtgatcctcctgcttcaaaagtgctaggattacaggtgtgagccaccatatttggccaagaaccacatcccagtgctgtagaaaactccaaaaatttattttgcaattcaaaatataaaagtttgttagtagacatttagtttgttagatatttaaatctactagacaatctattatgtattctgctcagaaatggttaagacctactgatctagaagacggatctctctgagccataatttctgctcaaggcttgctaggggagatccttctaacttggctttatacacaagaagctagctcacaaaaatgtcggtattctagtagctatgcstttcattgaccagacctgagatttggcctctccatcacttcctctgcaggtgatgtagacatcatttctgctgacatctatgttgatgcagttctagagtcatctgtgtccctattatcctgaaaatgaaaattgatagcaaaggcagataatgtccatttagttctgggtgtaaatgtcttccttgctcttccattgtgcaagcactttatgatttgagggagtaatcaggttatattccttctgttggccagaagtgcctgttgaagaaagacttggctctgttggtctggaagctaactatgtagactgatccacagaggactccatattcatcttcttgatactgagggcttcatctgtgagttgtaagcctgtaaatcctctgtttcagtggtttcaaagttccaagagcaggaggaaaatccagactgcctctgctgctgtgcagagcaattagacagtttgagtgcctcaactgttcctatacaggccagtggagtcagagccttaaaaagaccctcttctcccagtgctttctcaagtaagtacagcaacctcaatgtcttatagtatcactacagcacaatacatgagtagttttacatttgaagtaggattaaattaaaagtaatacattcacatggtaaactcaaaagtatatggccaggtgcagtggctcatacctgtaatcccagcacttagcgagactgaggcgggtggatcatttgaggtcaggagttcgagaccagcctgactaacatagtgacaaaccctgtctctactaaaaaccctgcagagacggccaaccccatctctactaaaactacaaaaattagctgggcatggtggcacgtgcctgtaatcccaggtagttgagaggctgaggcaggagaatcacttcagcctgggaggcagaagttgcagtgagccaagatggcaccactgtactccagtctgggtgacagagtgaaatcctgtctcaaaaataataacaataaatgtatatatagatataaattatatattaattctatattttatatataatatatactataatttatatacttataaattatataatatacaaatatatatttatataaattatatacctataaattatatatataattatatataggtgaatatatacagatgaatagttatatatgtagatgaatagatatatagatggataattatatatagatgaaaatatattcacatgttatatgaatatataagtatatatttatatataaattgtagatacataaattatgtgtaaaattcacatgaaaaactctctccacctcattttaccctttattccttctctttaaatctgttgaccaaaacaaatcactgttaacatttgttatttaggggtccagaaatgttttgtgtataaccataagcatgcatatatatacatatcaacagctacatctagatggtccacttactacagccccagaatggaaatttcttcctcaaagcaaacattagaggcatcttctgggaaaaaaaaaaaaatctatatttatctcattctgttcttcatttaattagcataatccctgttggatattttcctcaccaaataaggaacctgtaattaagtgttatattacatgtgcttatttctcttcctggaagtccattttttaaaaatatttttaattgatatagcatagttggtacatatctttggggtacatgtgatattttgatacatgtatacaacatgtaatggtcaaatcaaggtgactgggatatgcatcacctcaagcatttatcttatctttttttttttttgagatggagtcttgctctgttgcccaggctggagtgcagtggcgtgatctcagctcactgcaagctccaccttccaggttcatgccattctcctgcctcagcctcccaagcagctgggactacaggctcctgccaccacgcctggctacttttttatatttttagtagagatggggtttcaccatgttagcccagatggtctcgatctcctgacctcgtgatccgcccgcctcagccttctaaagtgctgggattacgggcatgagccaccgtgccyggccaagcatttatcttttctttgtgtcagcaacattataattcttttcttctagctaattagaaatatgtaataagttattgttaactataatttccccactataatatcaaatactgtaagttattccttatatctaactctatttttgtacccattaaccaactgttatttacccctgctcytctccttcccagcatctgataaccatgatttcacgctctatggagatccttgctttgatgataaattcattaaggacaagaaccctgcagggtgttcaatatgcttcccaggtgccaaatagtctcaatacatattaacagaaagtcagtgtcaactcacctgcacctcacacagtaaattgatttaggcatctcagattcctaaactctctaggttaacacctcatatagtaatgaaagtataatcagttcacatgattgaaatcctctctagtttaatgtacttgttgcttttccatggactttgaaaacatgaaggtctgtagccgtgttgttgcttttccatggacttggaaaacatgaagttgtgtagccgtgtgtctccagacttttaacagcccagaaatggtttcaatgttctgcattaaataaatcgagaagggttagacaaaacagtgtctgaaagatttcatgctgtgagggtgatgagggtgatgggtgacattaatgaatctgaaatggtcrtgactacaaacttgtttttaaaatgtcactttctctaagagaacaaaaacttgaaactcaatgttcatgaatacaagaaggccttttcaaagaaaggccacgggcactctcactaatacacacttggcatttgggtatatccctaagctgtggactgtgtttacatatattactctttcttctcatcactctttaaccaaattgttgagtgtccaagatgccacatggtcaatggattattaccctgtggattcaaatctgttaccaattactctaggggtttattgagtggtcctgcacacccactttcctttgtttttctaattatcgctgcacagctaatcctagctcaaaaaatcaattcctctctcatatctacttacatatcctctttaagccccttctgtgtttttttgttttgttttgttttgtttttgttttatctcacttccatctatttcctggttatttcaggaaaagttcttttcacaccactttttagtggattccatcctgtctctcttcttgtgaccataaaataaaatttgtcataaacaaatgtaagagtctggatgtttctacaaacatttaagtggcaggaagaagctaaagccatatttttcagtcaaaatgttagcagagattttcctgcactgtgcatgatttattttctttctttatatttttagataccttataaattgtctaaaatctcaatgaacaacatttatggtcaaataacataaagaaaaatcctttatagccacttacttactcaattgtatagtgttttgacattctaactacactatcagtatggttttctgttataacgtagtataggtatagattttagccacatagtaggtgaaataggctatgtgttaatctagactaagacacagccattatctataacatatattttatgagaatttgcattccaaggtaaaaacaactgtttgaaaagttaccttttaaacaaatccagttcatatggtgcattactttcattttctgaaggtgattcatatggaagtattgagaagagaaacatcatagtttaaaaaaggccaatcagactttgaggacaagatccaaacattatgcaactttatatcttagcagagtgcatttagtaggtgttcaataactctttgttggataaatgactttatgagtaaatgaagaaaacctcagagctattggcttcctgtgccttgaattacacttttgagtgggactgccttctgcaagccagttgaaaaatagctattggctcacagagttcacctttattttgaggactctgtcaagacaccttagtgcatgttcctagttatgtgaaagatatgctgccaatcagaatcccaatggtctccttgtatgtttcatctttaaatggggctgcgctgttagggacaggatatatcttggcagactacatggatatgaaaatttcaaatcttcccatagtcctctatctttaaggaaaatcatggcacttgtttttgaatttttttaatccatcttccagattccaaaactaggaattccaaatgttgtttggacagactgaaaagagaacaaccaataggagaagtggtacactatgagtagtcaaggtaccatacacatgggaagtgtgaaggagacttacttagtatttwcttatgtctctttgccaatatttgggagtttcacagagcatttctagataatgagggatggaagtgaagagtaggacaaggtattcaaagatctaagaagaatgagaaatcctcgatttcccatatgacaggatgacttggttacacgagtaaaytgctttttgtatgtgaaacaggcagcaattggaggtagcaaaggaatacacaggtaagccctggagtccaattcccaaaattagtggtgttttctgattccctaactgactctatggtaggctcctggtcaaaagatccatcagggctgctgggcccatgctgacattccatatagccatcttctttctgattctctgtcttccagtgatgatccagctctttgcagcagcaggattgtggctggccagaagcacacttgatttcaaaatggatgtgacgggcaggtcacctccttttctgcagaagtgtacttgcatcaacaaatctttttcctctcaggttttgaggaaatgggatcaaacattccaacacagagaaataggaggcgtgggcagcagctctcctggatctctctctttccttgaggagatcaacttgtaaaagattacaaaatgtaccctaagtggtcctagagcaccctcctatcttctttcccaagcttgtcatgtggttgcagtggacatggaaagtaaacactgctataaacagagaataataaattgtaagaaagcaccagaatatccttcttgcttgaactttgaatcattagatccaaacattccccctctctcttctcaaagttccaaagtgttaaagagttttgttctccggtatcaggagttggccacaaatgctttctctataagttcataattcctgttgggaaacttggaaaagagctctccccttctcatccaaagaagtgatgacttctctttgttagtttacaactaacaaagtcccatttctggtttgaaagtcagatggaccttggcttatatttatttaacraagacgtggaatttctctaacagactgaaagtttattagaataacatctagcattaggcctggcaaataggaggtcctcgttaagagatctgatcagatttgacttctaatcccagatataaggtgtttattctttttgagccactatttcctcatctataaaataagaaatattcataactattccataatatgtattcttatatcctgtataataaaataactaatataggaatataataaataactaggaattataaataatataagattgtaataaatatccaaaatcaagggcctccttgaatttgttatatattgatttgttgattttttgagggcagtaatcaccacgtctgtccagatcagcgcggtgtccacgccccactcagcactgtgccttgtccatagcagatgctcagtcaatatttatctaatcagtgctgtttgtattcaaagagaatgtttaacttcttactctttccattcccacctcccctttttgatctcatgtccactatcggtgtactgaggtctcctgggctctgtttgcaggaatctaaaagtagtttttttactttggtactgggacatgtaactccactttttagagaaaatatttcatgctaattaaaacatctcagggctggtctccctgcacttctcactttcacacctacatactcataccccttttctctttttccttactttgtaatgctattagagttgacagaatacttgctgcttccccagaaagtcttagccaggagttcatgaaaccctgtcaggccttgtgaaatgtacagatgtgtttcaaatgatccataaaccctgatattgtataaaatgtgtgtgccattttatggaaagaggatgatatgttttcttaaccaaaatctttcggggtacttcggtccataaaaggctaagatccactccactaatgagcaagatctagtcatttagaaaatcctgcactctctcctttgttactgcctcaatttccttaaaaagctcttataagataataaagaagccctctttacttcctacagttccactccacagcaataccagcttaagtgtgtgccttccagcgtccatcccatctctccgtctgaggggtccccactcctagtccacccaggccaggaaacccataactcatatgtaccagaaaacctcctttttaaatttcctcatgcttcctggcaccctgacctgacaatggactagtacctcatatccacttctaccatgacttctgagaaagtggtattttttaccacagtgaacttggtatatgcagtgtgtgtcaggggcactggccttactaaagtagaggcccattctggagaatagtaagaaataaggagcaatacattgatgaaatagaagggacattaagtgatggtcacagaccactcttaggactgccattaacttcagatgttaaagaagtgcttcagctctctgtgctttgtcttcttcttgacaagtgaggatgttaggattatctgccatgtcatccagcttcaatctctataattgtataaatctggttggcagtggactcgttagtgcaaagtcctaaagccttaaagatccgaagttttctcactgggcaagcaatttgcgggattacgacagtgaacttggtgtatgcagtgtgtgtcagggacactggccttactgaagtagaggcccattttggagaatagtaagtagtaaagagaaatacactgatgagacagaagggacattaactgatggtcacagaccactcttaggactgccattaacttcagatgttaaagaagtgcttcagctctttgcactttgtcttcttcttgaccagtgagaatgttagacgggattatctaccatgtcttccagcttcaatctctataattgtataaatctggttggcaatggactctttagtgcaaagtcctaaagccttcaagacccaaacttttctcactgggcaagcaatttgcgggaaattaaacaagtccaaaatattgaacaaatgaagaaaggggccattttaacagacaggaatacttcataytgtaaagatggccaggtgtagtggttcacacctgtactcccagcactttgggaagttgaggcaggaggattgcttgaggctaggagtttgagaccagcctgagcaatacagggagacctcatctttgctagaactttaacaattagctgggcatggtggcatgcacctgtagtcccagytatgccagaagagaagggaggattgcttgagcacaggagtttgcaactgcagtgagctatgatcttgcaactgtgctccatcttgggtgacagaatgggaccttgtctcaattttttaaaatatatatatacatatatatatatatakagagagagagagactatatatatgtgtgtgtgtatatatatatatabagagagagagagacagagagagagtaaagatctcatttcctccacaaatgttaaaaacattattctgattttaaaaaaagaatgaatttttaaaatttacaaatttctgaaatggacaaaaatatcctaggccttcttcctcaaaaaataataaataagaataataagaaattgcactggtatctgaaaaagcaacttaaagctataaaaattaaaatagcatgttatgccatgaaagagacaaatgagatagattcaagtttcaaaataacaattgttattattatgatacaattatattaattttgtacctataatttaaataaaataataataaataagaaaaatcactgaataaaggtaataatttaaataatttaaaatcttaaaataatgattatatgtataataaaactgtaaatttacaattatagagctataaacaattttatagttgtaatattttgtaactaatgaaacattatattttaatgattttattattgttgtaattaatataaagaagataaagaaaaatgggcaaggtttgaataagcacactttgtygaagatatatggatagccaaaaagcatataaaatatgaccaaaagcctctggtgtttagagaaatgcaaattaaagctaaaatgagattcttctaaatacctatcagaatgtctgagattaaaatgactgactgtagcaactagtggcaggaatgtggaggaactgaagttctcatacactgctggcagaaatgtacgatgacacaacccttttgaaaaacattttggcagcttcttaacaatttaaatgtacatatcccatgtaagccagccagtccactcctgggtatttactcaagagaaatgaaagcctatgtccayacaaagacttgtatgtaaatatttataacagctttatctgtaacagctaaaagttggaaaccacccaaatgtctatcagcaggtgagcggataaacaaattgcggcatatacagtgtagatagtggaatactactcagtaataaaaaggaatgaacaattgacacatgctacaacatggatgatgcaaaataattacactaagtgatagatgctagacgaaaaagagtacatactggctaggtgtagtggctcatgcctgtaatcccagtactttgggaggctgaggtgggcagatcacctgaggtcaggagttcgagaccccccaggcccacatggcaaaaccccgtctctactaaaaatacaaaaattagccaggcgtggtgatgagtgcctgtaatcccagctactagggaggctgaggcaggagaatcgctagaacccgggaggcagaggttgcagtgagccgagatcgtgccactgcactccagtctgggagacagagtgagactccatctcaaaaaacaacaacaacaaaaaaagtgtacatactgcatgatacaaaattctaagaaaagaaaactaatctatataaaaatttttctctgttattctctactgagaggggatgaggaggattaccaaggggcaaggaggaccttttggaggtgatagatgtgtttattactgggattgtgttgatggcttaccaggtatctatgtaagtcacaactcatcatatggtatactgtaaatatgtgcaggctgggcgtggtggctcatgcctgtaataccagyactctggaaggccgaggtgggagaattaaggccaggagtttgagacatagcaagatcytgtctctagtaaataaataaataaataaataaataaataaataaataaatgcacttttttgtatattgagttatatctcaatgaagctgcttttttttaaaaaaaaaaaaaacatataacataaaagagattaacagaagagattcaaaagtctagaacaccaaatattaaaggtagcttttcaaatcagtgagaaaataatgatattacagaaaatggcaaatcatctagaattaaatttctacttcatactatcagcaatataaattgcagactaatctaaattaacaatttaaaagataaaagaaactatagaaaaatacacaattatgtatctgttcttgaatggaaaaagattttccaagcgtaaatacaaagaaaaatttatatagtaaaacaatgattgatttaatttgataatttttttagaaagtttacatcaaaacaaattacaaaattgaaaggcaaatagcagtctggttgtggtggctcacttgtgtaatcctagcactttgggtggccgagatgggcagattgcctgagctcaggagttcaaaaccagcctgggcaacgtgatgaaaccccatctctactaaaatacaaaaaattagccgggcgtggtggtgtgcacctgtagtcccaactactcgggaggctgaggtgggagactcccttgaacctgggaggtggaggttgcaccgatctgagattgcatcagtgcactccagcctgggtgacagagcaagactcccgtctcaaaaaaacaaaatggcaaatagcaaaggggataatatttgccacaaatataaaagaaaaggatatatccttgctatataaaaaggtcctatgaaacagggacttagttggatatttctatttttaaaaaggcaaatcatataaacaagtgttttacccacccatcccccctcaaataaagaaaaaagacagggatggagaaagaagggggaaaaaaaaaactgagtaaaaaaattctttgcaaaagagtaaaaaagagatttgtttcctcaccttgatgttgtctttataagttgttttattttaatcttttgtttttccatattttcagagttcctacaatggacttgtagtacggtacctgggtgatcacaaacataatctagggagtagaaaagaagttcaatgactcagcatagtgttaatggtcttccagatgaaggaggggacatgaacatgtgtctgtcccaataaaggttgagacaaggtttgttgtgcacgtgcgcgtgtgtgtgtgcgtgtgtataacagtgaggagactgtaattagcaggaaaaattggggttttgaaagtagaccacagtcttgtcattgtaccatgactcmccaggaggacagaggacaagtaccctactcctgtgtaaatccagactgccaagtagagcactgagatttgatgagtacttaagaaatgcttgcttgattaattggtaaaagatattaaaggggaagattttatatcacattcaaacatatgaagagaaatgttaaaaatgtttaaagttccatttccagtctcactttccaattcttggttcaaaatacaaggggtaattagacatcgactgtgtagtcaacattatgatcaggctatataaaatcatgaaacatcatcctaaactttaaagaactttgagtttagctgggaaaatatgctcacaggaaataattatgtaggaaaagaaggcatcaaaagggcttaaagcaaccaatcacacagagtttccttgttgggaccccccccccacccgccgggccccaccccgttgatatcctaaatgttctcttgacatcttggatttaccatagagcctagtactgtctgtaaggtcctgggcctgttctaattagtgctgagtatctgttgatctgctacgtgcaaatgggaagataaaactaaatgttagattagggtcaatctttaaaactctttcctagattgtgatggtattcagtggtggttgaccatcatggaattgggagatatttgtgaatgtggctgcaggctgcatgtcctttgtgtctctgactcaagacacacccattgatctcatttgtcttcatttcatcattgggcagaatgcgttctaaaatgaagagactaaaaccttcacagaagcacactctttcaacatctaaggaaaaattgttgatgagaaaactgtgagaacattaggaggtctttaaattgcaaggggaaaggtctgttggtgaaaacagctgaaatcctatggattaaatcaacttgtaaataatgtattcttagagtctgcagtgatctcataggcatgtttaaatgctgtttcttatgactacagtttaaagtcatggtatggactttcagtttcatgaggctggcctgggggaaaagagcatgaggttgaggttgatggtgttaactagagcaactgagcccccatacagaccttctgaacttgctcattaacgaagccacaggatggaaattgtatagtgtccttgaccagagcattagttacaagttgtgagaagagaagaaataagtaagaaagaaaataaatgacttataaaaatcctcagaagatatagtccccaactgttagcacaaagaaaggatgtaaaatcatggaggacagcagtggagaagataacgttagcagacaataaaaggccaaagttttagaacagtagtaagtgtttaagaatatacataatatatcttcctccatttgctttttgtcttcaccataaatagacatgagttaacgtatgtttaaagatttatttcccttttattgagctcacccaacaaaagtttttttcatcatgtcctgcttttacaaaccaagatctaatttgacatgattacgtaattgtgtggccatttgtgcccttccttctcctcctcctttctctaaagtagaaagcctctctttcctagagcctatgtaaaatgtgttaattcgcttaatagcaataataattttcttatgacaatttatctattcactaaagtgttattaaggacctattagttggaagcctctgtgccagctgttgggaatagaaaaatttataagacactgtctttggagctttcaatctagtgggggattcaaacaattaaagagatacttttaaaagacagtgtaataagtactctggaagatgtggcagactgccagttgccttccccagcataacattttcccaatattcattaggaaaagaaccctttaattgtacccaattaaaataccgaatctcccagcctcttctgcagcagatgtggctgtgtgactaagttctgtccaataagatataagtatacatgtttggtgagatttccaggaaggatgctcaagtggrgatgactaagtcagaagaaagttccttttagctttcctgcattcctagaattctgatgcaaaagctggagctacagcagcaatcctggactatgaggtaaccttgggagtactagggaattgggatgctagtaactttctagaagcaccaactcagccccagaatgcctcctgctgacttcttttacgtgggagagtaagcatttgtgcatttaagccactatagttggatatttgaccattgcagacaaaaataagatcaaccgatagaatgccatttatgaaaaaaaaaaaaaaaaaaaaaaaccatgggagtggttctcctctctgttatgatagggagaggtcagagatgctgtccctgaagaagtgacattcacactgagacttaagggagaaatgagtgagcaaggtataggaaagtatttaaggaatatcatctgaagctctgaattagaagctatctacaagatactaaaagaagatcagcatgacagaagtacaggaattaagaagaacatagtaggtgacaaggctgaaaaatctcatagattctccattttgcagagacttatagatcatcttcaagatagtaatagctgcagagcagaaggctagagcagagaaagaactttgagagataccaatatagacatggtttctaaagtcttaggagacaataagattacccaggaagagtatttaaagtcaggagagggccaaagacagaaccttgagatccaacacttaaagatcaagaagaagagagtttcctatcttctgtttcttaaaaaataaataaataaataaagcatatcagcataattcagagtcacaaattctaagaaatcatggggcagagggcaggggtgaggtagggtttgttttgttttgttttgttttgtttgtagataaccaaaggaagaaacgattgatgcaagatttcagggagggtgaatagccctccttgtagctttgccctgctagagagatggtgggtggacaattactataatatttacaaacaggataagtctacgtcagcccctaacattctcagtttcgttatttgtaaaatggcgtaatgatacttatcttttagagttgtttgaagagtacataagagacggaaaaggatttttaattagataaggaaagcataatcacctatctttgattcattcacccttttaaactgattaaagcttagaaaataatcacatatgcagattgatcttagtttgtccacctcttgacaatcagttagtagtatatatgtatttttttatttttaagaatttttatatccccatgcattgactaatcttgccccatcatagataagactagaacaaaatattgctttgagaagtccttgagttccaaagatttaccatgaagctaatgaaacctgcattgcagagtccttcactagtatggccttttccaatgtcttgaaaggagtcctagtcacatgttcacatgcttacacatttatgtaaaatatgcaggataagataattaaactacaattatctaagatggcagtctttttttcactctgattttctgtccaaaatattcctcttgtggaagtaggtttggaatggccctgaacattttyggaatctgaactgagagaaagttgagtgaaagatacattgatttaaggcatagtgagatgtctagtaaagttattgtaaggtattccagtgttgaaaaggcttccagaaatatgccaaaaccgactgtgctgactcacatgatgtcatgccagaaagatgaagggccagagattgtatgatgacctgagtttgtccttgtgcaacaagcaccaatggcatatgagtgttgatgggacaagttttgaaatgtatggagccaaaagctagcctgtggaaagttctaccaggcattcgacatgtggtaaggtaaccaggagactaagttccgtggatgtctagtcaaatggaaattttcttctctcaagaataaacatgataatttcgtgtatgcaattctaaattcaccaaattgtgttttctttttcaatggcaatttcaggaaattaaatgatcagaatccccatgtttccaggggccaaacctgtaatagtcccacagacagtgagtgtgtctataacaactaatataggcagaaaaattcaaagacgttttctgaaatttgccaatacctgtaaacatttttaggacattgtcaaaataagctgtgaagctgaaagaagtttatttaagtattaataataaaaatttaataagctatgctaaataccaattctctttctattatctctatagaaaagattttacaaaatcattctcagatgtagaagcaatttttaaaaattcagccaaaaaatagtagggtgaaaagtattataatgatagcaggtagttaattaatagcatgttctttttctgaattttatgatgcttgtggctttgacaactttaaacattttataattgtggaatttcttttgtcgttttacagaaatattcagttttgtacctcataatttgtatttataattttgtattcttcttcataaaaagggccattgaattgtgtttaactcatgcctcaccaaacctgaaccagcattttcctctgttgaatttctattgcctgcctacagcaaggcccacgtcttcctgtaacagttgcccccagttcccttaactatcaccagggagtcagcagttaatgacatgctcaaccttcctccaattacagatggttaggagagaaaacaaagccataaggccattaaactcatgaggttttgactggtggttcggaggtagagctggccctggctatatctgccgtgtacacaagaaccaaaaataccacacttcatttcagaagatccagatttgatcccacctctgccactggtgtatgatcttcagaaatgaacttggctgtccgaacttcaatccccttattcatacgatagacctattgtgatggccggcaagctgaggtatagaaacacatattatatagtaaggggttcttcaaatgtaatatctgttctcaattcctcttctctatcattaccaaggagccaatgatgcacagctacccatgtaccttcattgtagagacacaccctgaacaagcagacaacatggcgccacatcagagtattatattagaatgtgtgtttggcatttctttagcagaggggccaagtgtaggaagggagcgggtagaaaaggaggaccacaggtgacaagagtctcccctgaccttaagcttgcagttcccactgaaccaaacagaagccctgtatgcatctggaagtccttgcttagtgggctgtgcaatgtgtgttttaggggtctcaagccttcatcccatgtagccatggacaacatgttccaggaaaacattacttcctcacttcattacattccaagtgacatttctgcatcccttcttgacgaatgttgtccaaaattggttgtccctctctttgatccagctctgaccacagagatcagttttacatacttgggtacttccccttggtgattcaagaggaggcactttccttaaatagccttggaaaccttgagacagctgctgcatccatctatgttcattgctcaaacttcctgtatggtttgccaccaggcttaggttcaaatccaaaatcaaaatcttaacatggccacccaggcgcatgtggcctcagtaatacacagtttttgagcttcatctcaagcttctcttccccttactttgctctccatgcctgcttccagctcttctgcttcacccagtccttccccatccctcatgtcacacaggttagcttctgtgcccaagtagggtcctgcttcctttcacaaagctgactcccatgagctctccagagatgatctcaagtgtcacttttgtggggataactaccccagtgacaccctcctccagatttggttagcttctcccattccagcctagtttagatggaatcatattaagttgctggcattaatttattatgacctacaaaaccatcaatagtgtacagttctcacaactcccttgtacattgcagccctcatcaaaattgttatgaagtaattgatttgaataatgattaatatctgactccctgatggtttataatctttgtggaagtagacaacatatctatcttgtctactgctatttagcacatactaaataccacctagtaaatatttgtttaatgttacttatttaactgcagagatatactttttacattttctacatttaagatgcacacggaatatgcgatgttgtggagaaaagagctatttgccaaatggttacttgttactttatttttctaaggctttgggcataaaatgccattatggaattactattttattacaatggtatctgtagtactttggccctaatgttcttttttggttatgatgctgcactatgcctgtggaatacattctggatgcatgatgagactactgagacaatcacaatcttgtaagtttccttttcttctaagataaatctcaagcagagattctcttctcaggaagagtagaacttttcacaatctcgagccaagtaaacactctcaaattgcaatgcaaaagattttgcaaaatacttgaaaaaatgcaatttataaagcagaagttgtacagatgccatggaagatctaatgaaaaatcagaaaagattgcagcacagatttaactcttctcaagacagcaaaagcaccccacatgtgacagatactcatgagaacattgggagcctgaagccccgttttccagacaaggaaggaattacgggtctctgatcacagcagaggggccctcattagacccatcaaggattgcacgtgccctgtgcaaggccacatgcgcatggggtgtgcaattaactctgcccatgctgctgaagtttcagtccattagtctgagtgaatcttggtcatttgtatccctcttggtgcctcataaacatatgcctcatagtctgcatcttcaaactttttccatactgtaaaactgtcttcgcaaaatctcatcacaagctgaaaagtgatccctggtgataaacaactgagatggttattcacctccatgactagcctttcagggcctcactttctatatccatcaaatgggaagaacaatagatgcctcatcctcctcactatgttgctgtgagcatctgttgaagtagtggctattcragtgcattgaaatgcatcagtcagtacacagatacaagggcttctgataactcatacctgaagaatttttgtcaaccctgaagggatttgcttcttggtatacgggtattaaaatactagtataatttctctaacgggagtatgatgtcactagttccagagtcttttcatagatggatgggttttatgataaataactcaccctcrgtgttaacttggctttccaactagccaaacaggcctttgtggaacaaggttagcaaatagcatttgggcaaacgatcaaaagggtctccctctcttctatcactctctttatctctcttggtacctctctctgactttctctccctcctttaaaaagttatctctgttttttttaattttttttacattaaaaacaacaaatgggcccttcagaatagtcgaaaactttagaatgcaaagatatcaaaaaataagaaataacctagatcagaaaacagataaatgattgccaggggttgggattgggaggagttatttacaaggtgaatgaagaaattatgaggggttgtggracttttctatattttgatcttgaaaattatataactatatacttgtgttaatcttgtagaagtgaacactaaaaagggtgaattttattataaacaattttttaagagaacaaaaaatgtactataatcccaccagccaataacacactattaacactttggcgtacttctgactagtctttttttttttttttttttttttttgctggtgtttcaaaatgtcattatgatcatataatacacaaatatacatatatgtgtgcatatagatatctacagatgactaagatagatgattgatagatgatagatcagtgaatagataaccaaactcaaaacaaaatagttaattcatgcaacttgcacaaaaggtacaagaaatatactatgaaaagtctccctctcccctttttccttgggcacctagctagttttgttttagtttttacctagctctcctgagacagtgtgcatatataagacaaaatatacatatacctcttttgtaatactaagacaccaaattcatacttctgcatcctgccttttttctttacttaacaatacatcttgaagatggttcaaattacacatatatagataatttttcatgactgatttttaatagctgcatagtatttctatattttaatgcactgtaatttatgatattgtattgacaaccacccgggttgtttttaatatttcatttttacaaataataatgtgataaacatccttgtacttgtgagatttcttttcctatatgggttatttatctttagtagagcttcttagaattggaattgtgaagtctaagtccacattttaagttttgctagataaagctacattgccccctttaaagttgtgccaatttttactccaactactgatatatcaaagtgtctgttcttgtatcattatcaaaattttaatatttaattatctgatgagtgaaaaatgacatctgatagtcctgtcagttagtattgcttttaatgtgactaatttttagcttttattcatgtttaaatgaataaaatgtactccctttactacttttttttttttttttttttttttttttgagacagggtctcaccctgttgcccaggctagagtgcagtggcgtgatcatggcccactgctgccttgacctccagggctcaagcaatctgcccacatctgcctcctgcctgtgttgctcagactggtcttgaactcctgagctcawgcagtctacctgccttagcttcgtaaagtgctggaattacaggcgagagccaacttgcccagccctgtatttcctttactttgaactgcatttgtgtatccttggttcatgttctatttgatagccatttcttcttaattagagggatttcttttttttagattagaaaaactagcccttttggctatgataagtggtttatatttccttttgtgtgctacttgccttttgtctttatttggcttttttttggacttgcattatttatttaagatttacgtagytggatttctttctcctttcacatatggcctctctcacttcaatattatgtagaaaaaaacctctgaaataatgaattcctatacttttatgggttctttttttattttgatatttgacccatctggaatttattttggtataagaatgaggtagattttcaacaatttattccactaaatcataaattagtacaccttttttccataaatggctaaatagtaaatattttagacttcatggatgatacagtcttggggcagctactcaactctggccttgggcgaaaaagcagccacagacagcacaaaaaccaatgggcataactgtgatccggtaaagctggtgtagacacacaggcagcaggaggatttgaccctcagattgtagtttgctcacccttggtgcagaagattacttaattattctaacaaaattgatttagtaaataattttccccattgatatgtcttggttcctttataatacacaacattattttttataggtaggtcttgtacaaaactctccatttgattttattgttctgtctttctattcataggctgggtatgacactaatttggttactatagctttatgtatatttttaacattggatgaggtcagttgctcctcaaaactcttatttttcagaattttgtgcaggaatatctgagtatttctaattagattagaatgtcagaatacattcatggacatatgagtttggggttttttaaaattttttttagatatccttcaccttgaacatttattatttctttgtgttgggaacaatccaaatctctcctagatgttttgaaatatacaatgtattgttaactgtagtcaccctactgtgctattgaatactagagcttgttccttctgtctaactgtatgattatactcattaaccaacttctcttcatctgccccccacctccacccatctcagcctctagtaactaccattttactctctacctccatgacattaacttttttagctcccatatatgagtgagaacatgcaatattttgtctttctgtgcctggcttatttcacttaacataatgacatccagttccattcatgttgatgcatataacagatttcattctttttatggctgaatagtaatccattgtatgtatatacacatataacgtctgtatatataatgtgtatataaaatgtatatccataatatatgtatatatacacatatatgtaatatatatwgtgtgtgtgtgtgtgtgtgtgtgtatatatatatatatatatatatatatatatatatatctcacttttttttttgagacagagtcttgctgtgttgcccaggctggagtgcagtggtgcaatctcagctaactgcaacctccacctctcggttcaagggattctcatgcctcagtctcccaaaaagctgggactacagtcatgtgccaccatatccggctaatttttgcattttttagtagagacagggttttgccatgttggtcaggctggtcttgaactcctgacctcaggtgatctgcctgccttggcctcccaaagtgctgggattacaggtgtgagccaccgcatctggcctcacattttctttatccattcatccattgatggacatttaggttgcttccatatcttggctgttgtgaatagtgctgcagtaaacatgggagtacaggtatcattttgatatactgaattcctttcctttgggtaaatatgtcatggtgggtttgctacatgatatgatagttctacttttagttttttgagaaacctccgaactattttctacagtggttgtactaatttacattaccaccagcaatgtataagagttcctttttcctttttccacatcctcactgacatttattactttctgtctttttgataatatccatccttactgagggaaagagggtatctcactgtggtttcaatttgcatttccctgatgattcgtggtgttgaacttttttttttttcagatacctgctagccaattgtatgtattcttttaagacatatctgttcattcctttgccctctttttagtgcttttacatatttggcttttgtttttttgttttcgttttcattttgctgttatgttgttcctggatatacaaggaactcaaactatagtcctttgtcagatgaatagtttgtaaagattttctcccattcctcagattgtctcttcactatgttgattgtttcctttgatgtgctgttagtttttagtttaatatggtcccatttgtctagttttgttttttgttgcttttgaggtcttagccacaagatcttcgcccagaccaacatcctgaagtgttttccctcttttcttctgtagctttatagtttcaggtcctaaatttaagtcttcaatccattttggtttaatttttgtaggtggtgagagattggggtctagcttcattcttctacatatggatgtccagttttctcagcaccatttattgaagagaccatcctttcctcaatgtatgttttcagtgcctttgtcaaaaatcaatcagctgtaaatacatgcatttatttctaggttctctattctgttccattggtctatacgtctgtttaaacaccaataccatgctgttttagttagtatagctttgtagtatattttgaagacaggtactgttatgcctccagttttgttttttgctcagtattactatgagctatttttaaaaaatacttccaaagaaaaaagtgcaaaagtttatattagcttactatagttttaataggttaaaattagtagcttctgagtaatgaagagagactgagcttaatttctcctgctttgaaagtacttctagggtctgggtgtggtggctcatgcctgtaatcccattgttttggaaggtcaagacaggaagattgcttgagccccagagttcaagaccagcctgggcaagatagcaagaccctgtctctaaatttttttttttaattaggcaagaatagtggtgtgtacctgtagtcccagctacttgggaagcttgagcccatgagtttgaggcaggagcacgctatgatcatgccattgcactctaatttaagcaacagagtaagtcctcatctttaaaaacaaacaaacaaaacaaagcaaaacaaaagaaagtacttctatttatttcttcacctgctaatttagcttgttcaagtgtagaagctggaggatgtttccctgcaatgacagagtagccaattttgtatctcctgattttttccttctctcattcttctttgctcaacagacactaaattgaggtttgtgtccttgtaaatagtagatttcatttaccctctgccacctttgtcaaaaaataattttaatttaaaaaatgatgtaaacttattttagcaaaattgaagactatagaaagctatgaaagtgaaaatttaaatcaccgtaacactgcactcagagataaccactgttaggacttttatttctttctttctcttctctatacacctgtaacatgcatgtacacctactgcatgcatatgtgtatgatacatgtgcaaacagtgcatgctaacattttctaccctgcttttccatgtgttatttttatcctgtgttccactattttggaaaccgtcagggttgacagagggaaattgatcaagccctttgtcttcattgatgtcaagagtttcagtcaacttggaggccgtggcctcctccttacaggcttcttcagcctttggtttgagtttgggttttttacttttcatttttggaggagccacgttctctctcctttcctattactggagagccgcttcctctcttcactcattcattgtgcagtgtgggggagtcaggacccagatgggaaagaaagcatcttgccacactcaaatctcatcttttttgccatgtttgccccatggcatttctctcagcatcttcttgtgctttttccaaaacatataaaggacaattctactctggaaagtcactgggatactgttctctgagaacaggtattgagaagaagatggtttcctcttggaacttggccaactggctcacagcgaacgtggtgtggactcttaccagctctctctagtatgctaagggcccccaaccagggaccctgaaggcatctcaagagagcagtgtccaggtctgcccttgttggaaggaggatgatgtgaggagatcacctttattaaagctgcaggttgtctgccagattttcaaatttcaatgtaactttttatttaaccaatgctgattaatagtagtggcattgttgaaatccattccccttcatttcattttctaatgaaatttcggatttctacacagacatggttttctggcataaaaagcttgcatttgcaacctgtcatattgggactgtgcagaacttttccatgttttaaaactcaggagaaagaagtaaagatggtaagagtgcacttgagcagaaacaaagggctgtgatcccaaaacaggggacaaatgagctgcaaaggagagacaccaagagcggagagcaagaggcaaagtgatatgaaagactccaaagtgctggttcagagaaaagaaaaaaaagggacataggtcaggaaaggggagaaggactgacatgaactggcaaatggcaacagatataaaaagccagctttctctggggagtggaaatgtttctaagcatttttgttcatgttagtatgatttgttttttcctaagtaagcttgaaaatcatagagtgaataggagaaaccaaagattagggaaaatatttttagaacaagctcagggaagtcatataggtttaaaatatatagtctatgcaaataatggcacacatttcagaatggaaacaaaaataagtggcagataatgtgtccaagtaatattggtagcaaatggactgttacgagagcaaatgatattttgcagagctgagagtgtgacytgtcttcaattatttgaatccctatcctacaaaagcattgaaaaaggaagatctggagccaatgactgtgtattacatatattttcattcagtacaagcagacatcatcagtgtgctatatactactttcattattattattatcttaattaaagctgtctyacgagccaggcgcagtggctcacgcctctaatcccaacactttgggagaccgaagcaggtggatcacttgaggtcaggagtttgagaccagcctggccaacatggtgaaaccctgtcgctactgaaaatacaaaaattagccaggcatggtggcaggtgcctgtaatcccagctacttgggaggctgagacaggagaattgcttgagactgggaagtggatgttgcagtgagccaagatctcactgctgcactccagccaggatgacagagtgagactctgtctcaaaaaaaaaaaaaaaaaaaaaaaaargmcaacawcaacgacaaaactgtctcatgatgaaatgggatgctttcactagccgtggttgctcatgcctgcaatcctagcactttaggaggctgaggcaggtgaatcacctgaggttaggagttcaaggccagcctggccaacatggtgaaaccctgtctctactgaaaatacaaaatttagccgggtgtgctggtgcatgcctgtaatcccagctactcaggaggctgagacaggagaattgcttgaacccgggaggcagaatttgcagcgagccgagatygtgccactgcactccagcctggacaacagagcagaacactgtctcaaaacaaaacagaacaaaaaaagaaaagggatgctttgtggaacagggagattacttgcactggaattgttcaagccaagttctatcaacatttgacacagaaacacaygaccatcgtaaggtctttcccagctcagcattctgtgactgcgtggtctttgtactgagttttacatgatatggatttcttaccttagaaggatcagtttttaaaagatgggctgaatgaatcaaatcagagaacactatttgcctacccaatatctagtctccacagctagctggggacactttatagccacgttaaaaaaacaacagcaaaaccccactgcatttctcaacttctgtagcagatggaggtggtcaagtgactaagttttagccaaagagatattagtgagaattgggagaaactttgagattccttaagaagggagacagaggatgctaacatggaacttgtcctttgccttcccattctcctttctgccatctggatcaggatatctggccatgctgaaatcatgagacaacatgaaggataaaatcctcaaactaagaatagaaatcagaacattaggacctggtctgagttcattgtggagcttccccagcccgctcagkctgcccccagtcttcccatttttagaaaaattaaaactatggtttgttaaagcttctattctgatggtctctgttacttgtagctgaacgcaatgaattgtgagatacgatttaccacaatttttttctttctttctttcttttttcttcttcttcattttttttttttttttwttttttaaagggttgtgccatgtcacccaggctggagtgcaattgtgcgatcatgactgactgtggtgtcaacctcccaggctcaagcaatcctcccacctcagtctcctaagtagctgtgactataggcatgtgccaccatgccaggctaatttttgtattttttgtagagatggggtcttgctgtgttgcacaggctggtctcaaactcctggcctcaaacaaatcctctctcctcagcctcccaaagtgctgggattacgggtgtgacccagtgtgcccagcgctgtttactgaaatttttttttttatgattctgactatagctttaaacccaggctctgccatctccatgctgtttaacaagttctctgcccttcgtctgcctcaccagatgtattatgtataaaaaaaagtcacaacctagattgcagaatttcatgtaaatcgcttacaaaacaacacagatagaaggcagcaattggtgagtttgatctttggtgcccaaatacagctgtgctatttggtgtatacaaatgtcaccaaattcctgcacaaatttgcgggcgggataggggaagaaggaagggatgatgaaggcaatggacacaacagtctaaaaagttttaaaaaattgaatgtaggtaaaatagagctcagaattcctccaccatcatctgcatttgaatctggggagaagtcagccctcccaactttcacttcctactagaatagcaagacacactctgcctccagacagtgtggattatctgccacccgaactgaagtttcaatcactcaaatcctggtgtcatttacattgtttctactgggaaaggtcaggtgtctgcaggggctataagcaaagaaaaacccatcccctggaaccaccagtgtaaaggagagggaaggcgagtgacagcatgtgtcgatgctggatcattttcaggggtaacagaccactacatcctgaggctttttagcaaataggaagctgaaggacaaacatctgaaggagaaattaatctccgtgagtaggtgacaagctgcgataagcccttggggtgtgtgtcagtgtagcacagatgttagtgtgagaactattacttgattcaagggaaaggggagaagggcagggaggggggaaatgacaatgaaaaacaaaacagtgaaaaccacaatcatcttcaccaggcagctgatttttttaaaaaggcatatatccatcaaaggaacaaaacattaaaatacacccatatggcaaagacctggtgtaactggaattttcacctcctgattttgacagtgtaaatttgttcagcccttttgaagagcaatttggcaatgtgatttcagagccatagaaatatgcacatccatctttcaaatgtcccagctcttataaatgtatctttaaaaagactcaaaaataatttttttaatttatatgcctgaggtgtttatttcagcatctctacaacagagaaaaatgaaaaccgaaggtttgacatttgagacaatattaagtaaatcaatacatgctaatttaatgggatggtattaagtaaatctaagaccagcctggccaacatggtgaaaccctatctctactaaaaatacaaaaaattagccaggagtggtggcaggcacctgtaatcccagctactggggaggatgaagcaggagaatcgcttgatcctgggaggttgaggttgcagtgagccaagattgcaccactgcactccagcctgggtgacagagcgagatcctgtctcaaaaaaattaaataaatcaatatatggtaatctaatgggatgctatgcagcactaaaagtatattttaaaaaaaacttgagaaatgcttctaagatgaataatacacaattaagtcaattacmtgacttcaaatattattataactgcatgtggacaagaagacaaaaccttcaaggaaaaaaagttttgatattatgagattatgggtaacattgtattcccagccttgaatttctgttattgttactataatatgtgtacaatttttttttagtgaagtaaaacaaacaagtaaaagaaaggttgaaacttcacaatgtagagatcaaccagcctgaacctctcattttacgggtgacaagttgaatacaaaacttcggtggaattgaacgggcttatttcagtggaaatagtgagaaatactcattttcccaagtgcctattagaggtgctgtcattttccaggagccaatagaaaaacacataaaagcagtgcattggtgtgatctgggctgtttctctgaaatcactcagctcgctttcaactgctgcgttccacaacacaatgtggttctacattaaccacattacatcataaagagatcattaaatgactccttatggaaagggagggaagaaatgatgtttagagaacctggtagtatcggaggcatcatcctccttctctgctgcctatctgtgtcgcactcactcttgaggttatgcaaagaaaatgttgacaatttaggtgccagctgttgtttgacgaatagcaaataaatgactgtgaagtcctttggaaaacagagcaaaaccaaattagtgattcccctcttctgcctcccaacatcttcacctccagggccttctttacactgactatatttcctctgatttcattgtcccaatgagacagtaatcctactgagagaacagatagggttcttggagactagaaattatgtttattgaatggttaaggcattgtttttttatcataagctataatttaaagttactaagaaaacaggccaggtctctgtaatgtagggaagcagagatcagattatcttctgggggatagtggaggagggttgtaaccaccccaagtccttgagtgaggatggaacctagggctcaacagcagaaccctaagaacggatatttttgcctaggcctaagaatgtcatcagcattttatttatttgtttgtttgtttattgagacaaggtctgcctctgtcacccaggctggagtgcagtggcgaagtcttggatcactgcaacctccacttccctggctcaagtgatcctcccacctcagcctcctgagtagctgggactacaggcacacaccaccacacctggatatagttttttttttagagatgaggccttctacattgcccagtttggtctcaaattcctgagatcaagcaatccccccaccttggctcctcaaagtgctgggattacaggtgcgagccaccgtgcccagcctcatcagcatttttagacagctacccctctgtgrtactctgtggtgagaaataagtttaagagataagtatgcagttatgaggaaagrtgatagaaccacaccatttttatgaataatatactaaaatatattcttaaaaaacttgtcagttgtatatttgataatagcatatttttacttagtccttattaaagatctcgggaaattcaaatctgtttcatctttgatcaggagagaagatgttgcccatccttagcccagagttagaaaggagaaatcatgtgattggccaaggtggtgatgagagtctcttcagaagggaagacttccagttgcaaggtcaggtgacccaatcaactgcctttgaacatctggaaaaatcttctaaaactcttccttctcaagaagtcctgcaactggagctactaatgaaagctctttccagtagcccttacagctaattttctgttcacatatttgtcttctgctgtaaagagctgtgcctcatagtgtattaagggctggcttttcctttcattgtaagggactttccaccacaaacacaaggccaycatggccagcaatgcacaaaacagcagagtatggtcggcccttaaagacaaggtttgacttactcctctcttctcttttttacagacatgtttctctactataaacttcactcttagctttattttcaagaataaaatatttctgttttcaaattggcatcttacgattcagcagactaacccaagaaataattttatggaataatcatawttcaatatcttatttcttttcaaaggaacatttaaaagcttataaaactaggtataacaatgaagctgtaaaagaaagtaagaaaacacaatcaaagttaaaatgaaccaagctaaaaggtaaatataattattggtgttaggctccatatttgcctacaggcttcctaatattcagagcaaaatggaaaacaaactgttatcctagctcaggtcacagatcgctctggccattcccttttatctgccctgtgtgctttcttgggctcttcttctgttaacaggactctttttttctttggggaggttcttctccaccctctgcctagggctgtcaatcaatgtgccccatcttctacccttctgcataggacccccattcccttgacatggtgattttccagaggatgggtacctaggtacctggccaataagagttcgagatcaataagagtcttcccagaggttaatacatatgctttggaatggagtttattgcccactaaagatgctaagctggaaaaatataaattgggrctatccattggctaaattccctgccctgaggagcaggcctgtctccagtgggaggaagaaaactgaacagaggagaattgcaaatggagagagagcaagccctgtgtactgagttctggcttctgtccctgaggccctgaaacctggctgctgcagcttttgattctgaccatgatccaagagtccttccaagcagtgagagcaagtaaattccattctttgattagcaagtctgagtagaactctgccacttaaaacaaaaaaagtccaaattaatacatctttcattattggaaaggaatcagaatatcagtttaacaaggagcccattttattttctaaaattaattttgaaagaattttctcacatgggacttaatagcgcatattgactgatgtaatggacaatgccctcaaccacatttttacagtaaatgcagaagcgaatttcatctgatggtttctagtataaaccttgaataaaagccaagggcataacattaaagcaaaattgagttaaagccattttggaagaattagcccagtgcacatagagtgttcaacatttgagtggctcaattcacccaagaaagcttcaagaagttgaaggacactttttaactttgacagctttcttcatgtgttcctttgtttccccatttacccaarcttctgataaaggttgaataacaagtattttgagattctaattttcaaccagagctaacattttccactactaagtgagaaagggatctaaatgcttcagagactgggggaaattagaggagagcaaagttatgctacttgtatctraatataagaccacttgtctctgcacagaattgacccctgtgggacctttggggatacctgcaagatatgcaggctgtttttttctatcaataaacyttggattttcaacaacacaaaaacacatcatcaattagatccccagagtcatgaaccaaaacagttttcacatgaaatttattcaaagtaaggatttgtagttacctgttgtgatatgggaaaaccacacagcagcttggcttccagtgtgctttccagagtgaattagttttaaagtgtttattttctttattccctcctccccaatttcacccagtatctgaaccaatgtatccatcaaagtagtgtaatcagagagtctgcctagaaatgtattttagttaatcatggctaataccaagcccttctttctcccagaaatcaggatgatgtccctcttggaattacttttgatttgtgactggttttgatcatgattacacttccagtacctggcgtaatacctagaacaaactcccagtaaatatttgccaaactaatgatagaatcagatttatattttgaaatgagcactctgaatatattctagaaattgtattggatgaacacaaaagtagagtgggaatgcagatgaaaggctctgtgcccacccagaggagggccgcttgtggcttaattcaggcagcaataatgggaactgagagaattgagctggtttgagagatatttaggaggtcagttggtgttatgaaaagataagggagaaagaaggaacaaggccagctagacatgttgtggggcccagtgggaaatgaaaatgctgagtctctcattaaaaaatcattaggaatttcaagagggtaatagtagagcaccaaactgtgcattgtacaggacttttactcataaagccagctctaagaataaaacatcctatattcattatgcccggggygcttccatttactcactgagtgcctaccatgacagccactgtggtaggtacttaattctacctaaaagcaataatacaggattaggatagaagcccaaatgaagaagaaaccaaacatagctccaatttatagcacctaagagcattttcacctgtaaggaattttttctatttttacaggaaaratcaagggatttgccctgattcttggagtacttaagtgcaaattttgaagcatttcaattgttgaaaacatatctttttttwatatactttaagttttagggtacatgtgcacaacgtgcaggttagttacatatttatacatgtgccatgttggtgtgcttcacccagtaactcgtcatttaatattaggtatatctccaaatgctatccctcccccstcccccaaccccacaacaggccccagagtgtgttgttccccttcctgtatccatgtgttctcattgttcaattcccacctatgagtgagaaaatgcggtgtttggctttttgtccttgtgatagtttgctgagaatgatggtttccagtttcatccatgtccctacaaaggacatgaactcatcattttttttggctgcatagtattccatgrtgtatatgtgccacattttcttaatccggtctatcattgttggacatttgggttggttccaagtctttgctattgtgaatagtgccgcaataaacatatcttttttttaaaacttagcatatatctatttgccatctcctgggtcaaaaagccaatggaaagctcaatgaaatctccaaatattcttaggttcaccttgacagatttttttctgaagagcaaaagagactataaaaaaacacttatcaaacatgagagattatgccttaaaaccacttaactcttatttaagatactactctgaaatatgtagatctgaaaacagggaagattaaaactcattttgctaatgagggcttagcccttgaggactccctgggtaaaattgtattatgggcattatctgggtccacactctgccctcaataacaagagaataaaactctcctctggtcataggtggagaattagcagcaccttgacattttgaaagaactagtctatcaaaatatataacagggttgtgacaaaagaatgaatggaaaaatcctctggtaggggtaattgcatatgattgatataacaaattatgattcagcatttactgagctcctacaggatgccatccattgtgtcagatccttctgcatgtgcactgagttaaattctcactgtaagattgacatagaccttatcactgaagatattaacaaatcctatcagttgagggaaattcaggttatgagaggtaaagtggtttatccagggttgtgtagctggttattggcagagccagaacttgaagctcgatcaactccacctataggtcaatactgtcctaagatttctggatacaagtttctgtattttcaaggacttcgttcatgggatttccccgtatcatgaatacctctctcttctgaatcatccctaatgcttgtagacatgttccaatatccctcaccttcaaaaacaaaaagaagatgaaacaaaaccttcttccttactgcactgctgttctcatttgctctgctccctttcacagacctacttcttaaaaaggcatttgtcatcaccatctccactttctcacccaaatttatttattacctttttgcttctatctccacattgccaaattcagtcacttttctgttcttattttattatgtctctggcagtatccaacaaagttggccattctctcctgcttgaaatactttttttaataatatattttgtcatctataacaccatatatcctcggtcttcctcttacaatccttttcggttttcctcttaccatctcctcgtagattcttcttctggaatacttttgccagttcttctgtctttgcttaacgaataaatgtagagtgtttctggaaatctttttctatatgctctttttaggtgacccctccagttgcttggccacctgtgtgagccatgtatctatgactctcaagcatagtctctcccctggacttcagacttgaccacccaacacccaaccaccaccttgaaatccccacttggatgtccagaagatttctcaaacttcacactaataaaacagagtcctagatttctctcctccaatcctggtccacctcccctgtgcttctacatctcagtaaacattaccactctccacttaagaaccttaagacagaaatctgaattattcctttttacttcctcatcaccatactaactcaatcagtatgccctattgcctctacctgtgaaacatctaagtccgttcactttttaaaacattttttaagttttttgttaatgcataataaatgtccatagttttggggtacatgtgataatttaagacattcatctaatttgtaaagataaagtcagtgtacttgggatatccatcaccttttaaaagtatttgtctttttataagctagaaacattcaaattattcttttccagctatgttgaaatgtacaatagattattgtaaactatagtcaccctactgatccatgtaacgctagatcttatttcttctatcaaactgtatatttgtacccgttagtcaacttctcttcatggtcacttttatacatatccatttctttcacccaagttaaagttactatcctatcctgcccgggctacacatggtctcctaacttcaacctcattggtctctttcgatttcttaaatataccaagcagattctttccagcttggtgcctccaaggtaactgtttcctctacctggaacactcttcccttgatccttgcatgatttgctttgtcttgtcattccatgaaaataacttttactctgaaaagccttagccaagcccctaaagtagccccacagtcacatccactctcctgagcacttgttaccatctgattatgtttgttggcttgttcgtttgytgactgtttggaatataagcttcacgagggcagctgtgtaccctgttcaatgggacatcctcaacacggaggcagggcctggtacagcacagtcctcaataaatacttgataacaaaataaataatttatgttgcattttggaataataattatattcttagttacacattagctgtatctagaagactgataatactgggggaccaaattaccttttaaaattatatttaagcctactaaacaacaacttctgagttaacaatattaagacaaataaagaatgacatggctcacaattataaatcagctatggttaaagatactcttaaatagtaaaaaataatcaagaaaatgttatggatttggcctctcaaattatgaccctgttgaactatacaaaatataaacaaagaacaatatctgaaacattattgaaatttactttataactgaaagttagtataagcagttaaaactgaaagtaaatatagacaaaataattgaacatatttgacaaaatatagacatctaaaagtgaaaagcattttaaaagtgagaaaactcctagagagtttgaactattatatggtattttcacctttagattatgaatagcatgaatgagatgataacaatggtaataacaataaattcactataagttcttakaatttagaagataccattctagaagctttccatgaattatctcattaactattactgcagtcttatgaagtgagtattatgatcatttctaatcttatgcatgacaattgagatttaaagagtataactttccaaggtgacaaatttagcaggtgtcagaatccagttctgtcagaagaaataagtagaaaataaaggtgggtttgttggcgactagataatcataataaacattgatataatcgtttataatttttcataamcgtagaaattatacaacctgtgtaaagccaaaatactttggtgatttctgggttcagaagataatgccttttgtagctatggagcttagatcttgtagctatatgtgtttgactgagggaagtggaaattctctaactgggatatcataccaggatgatgaattacctgtgcaaactctcactattgcaaggtcctatctacctggaaatataagattaaggtttgcaaatccacttgggtaagtgtgtctcaagattttaacctatttacttataataattttcgtatttgccacctaagttttatacacaagactaccaaggaatagacataagttgcaagtggtcacagcttgacctgaaaacctatatcagtaaaccagtggagctctccttagaacagtaaggaaaagaagtgtaagatatgacttcagctgatacagtcagcaaatacttcttggatctatctgtcccatacactggtccaggccctggaaattgagcagaggtcaaataacccacttccctcatgaaacttacattgatggaatgaactactttttatatatttaaaataaaaataatatgaaaacttgaggtaatgaatgctgggcacagtggctcacacctgtaatctcagcactttggaagactgaggcaggaggatcatttgaggccgggagtttgagatcagcctgggcaatgtagcaagatttcgtccctactaaaaaaaaaaaaaaaaattagatgggcatggtggcacatgcctgtagtcacagctactcaggaggctgaggtggaaggattccttgagcccaggattggaggctgcagtgagctatgatggcattactgcattccagccttggtgatagagcaagaccctgtctctaaaagacaacaacaaaaacttcaggtaaaagtaaacctttctttcctttcatgtcagagaccacatattgcaatgagagtgaaatcacatgaaacttataaataaaactgcccttctatcagaatgaaagaaaggacaggaacaggtcaacttggttattttctctctagacccgtcattgagggtagccaccagagggctacctagccatacctaggtcacatacctaagtaacctgatacaaaactttctcctacctcctcctttttcccacctgtgaacctaacaccctgaaatttagcatctagaagtatctaaatgaagacagacatataatttttgcccctgagctcccacccttttggactggaattggacatatctctggagccacaaatcagagtcacatagatgtgactgccagcttttgtgacttggactcagtatctttttactgcgccaccttacgtttcactcagacaccatctggtgatggattggtccgtcatgcggtatcagtctgcagaatcatcttcagtactttaaggacagtgcagactagaggaaagattccaggttagatgtcagctatttgccaattagatgacctgggtatgtaatgagaatgcatagccccacttcgtctggtaaattgggactgtaattcttactttgtyttagcccacaggatgatatgtatagaaagtgagttataaactgtaaatgaagctgggcacagtggctcacacttgtaatcccagcattttgggaggccaaggagggaggatcacttgagcccaggagtttaagatcagactaggcaacatagggagaacttgtctctagaataaaatagaaaaacatagccaggagtggtggtatgtacctatagtctcagcaacttgggaagctgagctgggaagatagcttgaggggaggagttcaaggctgcagtgagttgtgattgcaccactacactccagcccgggtgacagagcaagaccctgtctcaaaagacaataatattataaataaataaataaacaaactgtaaatgrtacaaatataaaagagcaatactaacgacaaataataatacatataatgaatgcattgataatgacagtgaaagttagaagtgattcttttagcacagagataagagattagctcatggctcaggccaggcctcacagattatctgtctcctggtgggactaatgcaagatctgaagtttggtctgtaactttgtcattttggtttgttctatggaccaaactctggagtactgattaacatcattgtctagcagttgaaagctctctgataaccttggrgagtgctagatagaatagatacaattttgccttttgattttcctttgcccaaacaagtggttcacatatgaagatgtcttttggaagggaaaaataaaaattacagattcccatgtaatagggaaactgagtcttaaaatccaacaccaccatcttatttctaagtcgtttttacattagggcttgttataaacctaggttattttgttttgcctacgtgtaaatcttgatggattcaaaaattccccaagtaacttagtgagatttcaaaaagrtccttgattttagcagcgtttttataaaactgtcagttacagtagataacaatagcaattctattctcctccattttaaactggaatttactgattcaaatttttaagagaaaaagttcctgaacttgtccccttattctaggggaaaccattttggtgcctgtctatagctacttatggcctctctctcttgttttttgagacggagtctcgctctgtcacccaggctggagtgcggtggcaagatctctgctcactgcaagctccgcctcccaggtgcatgccattctcctgcctcagcctcccgagtagctgggactacaggcgcccgtcaccatgcccggctaatttttttttttctctatttttagtagagacagggtttcaccatgttagccaggatcgtctcggtctcctgactcgtgatccacccgccttggcctcccaaagtgctgggattacaggcgtgagccaccgcgcctggctggcctctcttttttgaatgaggtaaaaaagaagcttgagaggcaaaacaaccaacagcaaataaccctagtgtattcattcattctcacactgccataaagaaatcctggagactgggtaatttataaataaaagaggtttaaatggctcatggttctgcaggctgtataggaagtacagtggcgtctgcttggtttctggggaggcctagggaaatttacaatcatggcggaaggcaaaggaggagaaggcacgtcttacatggtaggaacagaagcaagaaagagagccaggaggtgctacacacttttacaagaatttactcaccgtcacaacagtaccaagggggatggtgttaaaccagtcaagagaaaccacccctatgatccatcacctcccaccaggccccatcttcaacactgggaattacaatagaacatgggatttcggtggggacacagatccaagccatatcacctagtaatcatcctcaccttcagttaaagcagcctgtgtgtttactrawgaaattagctacttgacaccaatcttttcagcaatactgctgtcagataagagaatcattgagtaaaatgccattaattgcaaataataaaacgtcattcattcaaatcacgtaatgagaagtttgaattctgtctccaaaaccaacccttacttttgtttatttatttttacctagtacccagggcatgattctgtctatgctgtcataggtctttagattttagttgccattagcaggcattttcattcaatttatttatttatttagagacagagtctcactctgttgctcaggctggaatgccgtggtgcagtcatggctcactgcagcctcaaactactggcctcaagcaatcctcctgcctcagcctcccaaatctgtggaactgcatgcatgtgccaccacatctggccctggaatatgattttataagaaagctgtctctctattaaagttttatgcraagaggaaaactaaatcagtggacagagctaagagttagacracccagactttcctccctccgttgcctctgtttctgtctttgcaaaataaggaaatttgactagcttatctttaaaacctctacttgctcattctatgatggtgccttgagatggagattcagtgagagattcttgtttcagtgcttttatatatttaacaaattttcaccgagtacctattacgtgtcaggacctgctctaggaaatgtggatacaacaatggacaaaacggacaaacctatgtcctcatgtagtttacattctaaggcctataaagtattgtctatttgaacacataaaatgtattctcccagtttgggcagaaacaggacttctgcaaggcctggagaagtaaggaagactgaagcaaatggaatccatggcactttccaattttgtactttctctttctgtctctccttactttcatttcttgacctactcctagacccatgcagataccaaattttacaaattttactaccagcaaatagttatctattatgcagttaaactgtgctatgtgtagggatgcagagcaaatcaagacatagcatatgccttcaagaagccaatgatgtccttgtgagaacaaaactcacatatgtaaaaaawaattgctagttcaaaatgtcagaggctgagaaccaggaatatggcctgaacagttgtgtgctctatcaggagagattcactaaaagttagtagacttcaggaataattttcagtgcacataaagcttgaacttaagtaacataggtagttttcagattttaaaagcaattttcagtaaatacaagtagagatatggcctgcaaaataagagtaggatatagcaagacacatttcttattcttctgacaaggtagtacacagttcatcactttattgacaagatttattgatgtgactattgtgatgtcatcaacaatggctttgaagttcagaacatgagaaagagctaatggtagggactgacttgaaagcctttgcattctaagaatgatgattaggtttctaatgtattattaaataatgtccagcccacaaaaaagatgaagtctgcaaaggtatacacaataactctgtgccttgctatggtcctatctgatctcaaacaagaagctctttgggttgtgttgctggtggttggatgtgttctgagccatagctaggcttatgcacataacaaagtctgattcccaggaatctttttaggaaacacctcccagattaagtaatatttacctacttgtcctctttgaacagtgctcctactgattctttaccctaatgaagttcatgtcccaacccacacccttttcctaaaacaattaagcttttagtggtgacatgatgaaaaagaaaaaaaaaaaatagatgcaatggctgacttttggaaagttcccagcaaaaaaaaatcccggtggctttctgagtctcagcatgtttcttcttagttctgtgtacactgagataaaagtagagtgggagactgagtttaccacctgtgctaaagcagcagctgttagcattggtgacattcattgttacatggatatcaattgagctgggattaggaagccgcctgtctcctcaagcttgttacgattcagtcacttggaaaaaaacaaaaacagactttcggatgaggattctaatkcccaggtgacctgaaagccaggttcagcgtagtcaatgagcaacatgaaatgaaatttccaatcagaattctcattagccttattcagcactacccagatggatgttccttttgatgtctttgtcatagcagcctcacctatgcaaatattgccagtattaccccttatagtaagttgaagaacttttaagggttgtgaactttacataggtaagtgaatcaagtatacttgaagagcctctctgttgacataagtaattagattattggacaaagatctgatctagtaattttcttagtatgtatgtgtgccaaagccaagagaggatatgttattaattagcaagcaaaatttctaacgtaggggttttcccacatcttaagtaaaattctcgaaacctggaactatggctggctctctggaggtgtttcataaatgcttgctgaattaatgaatgtatccacaggcatcttttaagtggctacaatgacattaagaagaaataaggtcacagagtgtagttgccgcctcaggctctgggaaggatgggtctggaaacaaccccacagtagaccatacacattgtttttgagactttcagctcatccatttggttactgattacaagacggtttttttttttcgtctcaaaaaatgctttatttctcagaatcccatttcagcattattggtttttccctcaccaattctattttcagctttctgccttttctcataatgacctgtaggtgataaattagtaataataaaaatcaataaaaaatgataaagttttttttgggggggaaataggaatgagtttcatgttaagaaaagaaggaacgttccagatggaattttctgtaatgttaaatgtacccatatggcttctgggaaatttaggggcatccttttgtattagggtaacctaatgccacctgctttaaaaattcatattaggaaatagccacattttgaccttcttgaacgatgttcctttatcaatcaaaaatataaagggtgttttatttattagtcattgttgaaatccgtaatctctttctatcgccaaattgtcttaaaacgtctgtccagcacatcattgcaaccttgactgtcccttccactgtgtgttgaagagtcacaggtcccagggggagctgcgaagaaacgtaaaccaaataccatttcagtaactgttaagggacaattgtgacgattttgtaatgcttgrcatgttttgcttataatcttgtcctacaaagaagcctatcagcagagatgagagatttttgctatgcaaagattagattaatattgatatttgcagaactgggttcaacctgtgggagacctagtcgcaggtcttgtagaatttatagcatattaagaagatatttaaatatttggcttcagtgtgatggcctcatttctacatacctttctaatatgtgccaactctctcttcttcatttcacttgtccgctgaaagatgagtcatcaagtctggttgaacctatctaatatctcttgaatcagtatgtctctgcatctgtattgccatcaccctagttctggccatcctcactgaccacctgactttctgcctaaatggtctcctactttctggtcttgtatactttcaaccctttctctgcaatcagagtgatattgcttccartgttgtacagacaattcttacaaggtcctgcagcttttctttcagtctttctttcttttttttttttttwttttgaaatggagtctcactctgtcacccaggttggagtgcagtgggcgcgatctcagctcactgcaacctctgcctcccaggtttaaacgattttcgttcctcagccttccaataactggggttacaggtgcatgccaccatgcccagccaatttttgtatttttagtagaaagagggtttcaccatgttggccaaactggtctcaaactcctgacttcaagtgatctgtccaccttggcctcccaaagtgctgggattacaggcgtgagccactacacccagctctttcagtcttactgttcgtcatttttttccctcccctttctgcaccctcttcactctgctttcccattctctatgcctgggctacatcttaaaagacgccatgttctcctggggtctctggtgtccctgattctggaaatgctttcctgtctcttctctctamcccatttcacttagataagtcctatttatccttgagatttctcataggtggcagtctttttcccataagacttttcctgttctagacctggtggctcacacctgtgatcctagcactttgggaggcacagccagggcgaatgaacccaggtgtttgataccaacctgggcaacatagtgagactccatctctacaaaaaataaacaaccaggcrtggtgatgagcacctgtagtccaggcatggtggtgagcacctttagtcccagctactcaggagsctgaggtgggaggattgcttgagcctgggaggtcaagacttcagtgagccgtgatcatgccactgcattccagcctgggcaacagagcgagaccctgtcttaaaaaaaaaaaaaaaaagaagaagaagaagaaaagaaaaactttccctgatatatttaggttgagactagacaccctcttatctgctcccacaatgcccacgtcctccatcactgtactgaccatactctggtaattggctgtttatctgtccaatgccttccctagaccagaagctcctaaaggacagagcctgtattcccattcgtagtaccagcgttcagcacagtagctggacctgactaagcaccaagtaaatatttgttgaattaagaaaattaaaaaaaaagtgagaagtcaacagtctcttaatcaattgtaaagaaacactttactaggatgttctgacagctactccaaagtatcaaatattttaagtgaaattgtgatgtctggtgacattttttcaatattttagatttcttacacacaacttattttattttcatccactgaagctctcaagcatcttgttaaaataaaataaattagcttggtttctgtatgtgtgtgtgtgtccttttttggggggaggggggctggtggcaggacagggtctcactttgttgcccaggctggagtgcagtggcaggatcatggctcactgcagcctctacctcctgggctcaagtaatcctcccacctcagcctccctaatagctgggattacaggcatgcaccaccatgctcaggtagggttttttwaatttttcatagagacaggttcttgtcatgttgcccagtctggaatatatatatttttttgacttttattttaggttcagtgatacaagtgctggtttgttatatagataaactcatgtcacggggatctgttgtgcagattgttttgtcactcaggtactaagcccagtacccaatacttactttttcttttcctctctccaccctgaccctccacgcccagatagacaccagggtctgctgttcttgtccttgtgtccatgtgttctcatcatgtagctcccacttaaaagtgagaatatgtggtatttggttttccattcctgtgctagttcactgagaatgatggcctctaactccatccatgttcctagaaaggacatgatctcgttcttttttatggctgcatagtattccatgctgtatatgtaccatattttctttatccagtccaccactgatgggcatttaggttgattcctatatattttttaattgacaaaaataataacccacagaatcactaagtaggggaaagatcagctgctgatattttggatgtacttttctcgagtccaaaggataattcagtcaacttaaaatagttatttaaaaatgtgaacagaatttgtggatgttgagacagattcacagatccttaggaaatattaaaacttttgaaaaatggccacaggctctgaaggaaaagagcagttgggcacttaatgccacaagttactcttataaatcattatgctaatgatagaactgaggtggttcatttgggaaaaaaattgaaataacatttaggaaaagctgagaggctggcgatcaccattatgaagacagcagcctgcactattattagatgccaccaataaggggaccatatataactgaaggatgactttaggagtcattgtaaacctgtcttctgacagcagcttgagacaggaattgcattcttcctctaaatccttttaatttagtaaagccctttattgaaacatttacaagcaaatgtaaacttttaaggattcttacatcccataaaagcagtaattttggcatatagctcatcaacatgaaatgagtaaaaacatgggaaggcagtactttttgaatgttgtatgccatttggcaaatctacatgttcctcccttttttcgcatctccatgttcctcctaaatgaaggagttgttgttratgttggtttactttaatatgtccaattataccattatcatctatttatcaaaatagtgccatttaattgccttttgctttaagctgtattttatatgaaagattcctagtgttatttctgtcctttggaatattatccagcagagggaattttaggatctacttgataatacagatttgctaatttccacgttagtacttcagtgttgtttagttacacagtttcgggcctcatgatgtgtttgatgatttgggagtgataaaatgagtcttaagtaaaaatcttttaattaaaacaaacaaaggatcagtttttatgggaaaccagtcagtcagcaagtacatgtgttttaagtccagaaggatgctcaagtggaggggtagagagagagagcccttgggatccagggattgtagagtaactgctcccattatgccaggcctagcagggctgtcccactgtctctgccctcacactgaccacttcattactggttgtttttactgagcatcttttcagagatttctgagaacatggtaattttcccagaccatacacctgagagatcaggtactatgttgcctttaaaaacaacaacaacaacaacaaaaacctttatatttttcctctttttatggtgaaatatggcatactttattatttggagaaagacagaaaacatggtttttttctcccacaggccacaaaataccatcttcctcttacagggaatgagacttttgtataaagaggcacaatttcctgtcccactaggagaaaattattctcttgtctgagtctcaacagaagcttgtgttagttgctgttataaattaaactactactcaacccagcagtcccattactgggtatatatccaaaggaatataactgttctaccataaaaacacacgcatgcttatgttcattgcagcactgttcacaatctaaaagacatgaaatcaacctaaatgcccatcaacagtaaacaggataaagaaaatgtggtacatatataccatggaatactatgcagccataaaaagaacaaatttatgtcctttacaggaacatggatggagctggaggccattatccttagcaaactaatgcaggaacagaaaaccaaatactgcatgttctcacttacaaatgggagctaaatgacgagaatacatggacacatagaggcaaacaagagacactggggcctattgagggtggagggtgggaggagggagaggatcagaaaaaataactgttgggtactaggcttagtacctggatgatgaagtggtctgtacaacaaacccccatggcacaagtttacctatataacaaacctgcacatgtacccatgaacctaaaataaaagtttaaataaataaataaacttggtctccagtgttaaatatgatatgtcatcatcctcatttccttcatccagctattttatattcctcccatctgctctgtcctaatatttatattctgtaggccttatcgtgcatctcttattccttctaaatatgttttaytctgcctggttcctccactcttttggctcttgttttcctacttcctttaatgtaacagtaacacagtgagcacttaatagcagtctagaataaactctgtgttcctgctttaatctatatctggtctttatctctcacctttatctttacctctgtcactgtgtggacttacactgaaaacagaactataccatgcccccatctccatgctgagtagctggtttataaatcaggagagacaatgctctttagatattcttaaatttgttataattctttcctgttatccagctcctcaacctcccttcccagctctgtctaccactttgtatcacttaagccacgttttatctacgtcttctctgtcactaacctttagtcccttgaaacaggcacaaccaaacaggactgacattttgcaagtcccttgagattttgcctaatccttcacagcaacctacaaagtcaatctggggctggtggaaattctcctctttcagccttttccttcttttggaatttgggggtgttttcacagagtgatttaccaagaaaacattctaaatcctcaaggatcacttatcccttacctcgtggttgtttgctcgagaccaagcacaactggacatttttgaacttacgwctttctccctaccctctttgttctccttctcccccttcataaaatctgacttcagtttggccttcaagtgagattgacttttagccccttccatttggcaaatccttcaacaaaaaaacagaagtgtcatttttacggggtgacaaagcattaagaagatcgctttttcagccttgctgtgcttcattataggtaagtcctcatgtggcaccttttacaagaggaagtattgtcatgctaacaaaatggtttcagatagtatgaaatcagtggtgagaagaatggctataaggaatgggctctacaattactgtcactctcagcaaaagagaacgcaaggaatgcatatttcatctcatggcgacctgaggatcgtcctcaattccatatgtaatactttctaaataatggtgacctttttcacgtccccttcctgtatatacaaagtactatgtggataatgcagcctgagtgagcttatgagctaatgcagggatttttattattaacaataatmatagtgaacaacagtttattcatgtaagatcaagcaactagtaagtggtagaaccaggactgggtcatagggtaggtacatgtgtaccacttttaaatattgccaaactactttgcaaagtattgaattattttacattcccaacagcagtgtctgggaattacaataatccttatcatgcaatgactggcgtattcattctttttaatttttgacattctaatctgtgtgtagtgccatctcattgtagtttkaatttgcatttcgctagtgactaatgatattgagcatcttttcatgagcttatttgcatatgtatgtcttctttgctaaagtgtctatgcaaatcttttgcccatttattaggttgtttgttttcttatattgagttataactttttttttttttacatattctgcaaacatttttaaccagatatgtagtttacaagtgtgttttcccagtctgtttcttacctttacattcccttaccagtatcttttgcaggaaagatgttaaatctgttgaagtgtagtttatcaagttttttctttggattgtgcttttggtcttgtagctaagaaaactttgcccaaacaagataacaaggattttctcctatttttttctaggcatgttatggttttaggttttacctttatgtctatgatccattttacattaatttttatatatggtgcaagttatggatcaaagtttagttacatgtggatatccaagcatcctaagcatcttttgcccaaaagataatcttttttatactgagttacctttgctgctttgttaaaaataaattgactatgtgtaagtctatttctggtatctctattctgttctattgatctatatatacttatccttaaaccagtaacacgctgtcatcatgactttagctttataataaatcttgaagtctggtaaattaagtcccccaatgtttttctttttagacattttttttggctactgcaggttctgtgtattttcagaggacttttaaaatcaacctgtcaatttctaataccaaaataaagttctttagaattttgattgggattctcacgaatgtgaagatcaacttggagaaagctaacaacttaatattgagtcttatctctcaacttattttggttctttaaaacttctttcaacaattgtttttcacatagagatcttgtatatattttgtcagagttcgcccaaatggtacatttatttatctatttatttagagatggagttttgttcttgttgcccaggctggaatgcaatagcacaatctcagctcactgcaacctccacctcccaggctgaagcgattctcctgcctcagcctcccaagtagctgggattacaggtgccagccaccacacccggytcattttgtatttttaatagcaatggggtttcactatgttggttaggctagtgttgaactcctgacctcaggtggtccacctccctcggcctcccaaagtactgggattacaggcatgagccactgtgcctggcccaaatagtacatatttttgatgctattattaatgacattgttttattaatttatatttcaagttgtttatttctattacagagctttctctactatgctgacatccatctgaggtctcttctcaacagaattgmctttaatgtccacatttctaccaagcttctcttcaaggaaatctatattttttctattactcaccttaaaattcttgtagcctctatccatttcccaattccgaagccatttctacatctttaggtgtttgttagaggagtaccccactttctcgcatcaaagtctgtatcagtcagtgtttgacagagaacagaaccaataggagatggataaataggtaggtaggcagattagtaggtagatagatagataggtagrtagatacatagatagataatctatagatatctaatgcctggaaagctaatttttctatatattttctctattattttagttgtttcagatagaaggacaaattggatccctgttactctatcttgaccagagtgaaaatctgattaacttttaatcctcagtctcctcatttgtaaaaygaaaataataataaaatctatttcatgaggttattgggatgttagttttgttaatatgtataaaaacttggtgccttgtacataataaatactcaataaatgtatttaaattttgaacaacatatttgacatattgtgattwmcaagtatctatactcttttatgtttgttaatgttatatatggaggcaatctgacttaacatcaaaaaaaaaaaaaagaccattcataagatgtagtcagtaccagtaaatgagagcacattttcctctaattgggtgtgtggatattggttttcaccctacttggagtttctgactatttgtcctagtgaccatcactatattcatttataatattattaaaatcaatggatgagtcattggttaccatgtgtattccggttctgaaacacaccctcctcttccccagccagcactcacctcagtgatacccagtctattgcaggttttttatgcattttctaaattacatgaaagcaagttgacattctttctttgtcttagtcttccataccattattttggcatgtttaaagtatcatccatctgattatgtttggaaataaaagcatgaatttgttaaagacatgtaccttccaaactgcacacttattgtgttttcactttcttatcattgtcccttcattagagaaaaaaatctattctgtgaagtatttggttttttatgcagtctgctctgctctaatatacacaaacacctgattctgcaatgagaattagttggtatgtgattgttgagcagggaaatagtactatttcacagaatttcctttagtttatatatggatttttcttggctgaagaagccagattactggagtaaaattataatctccagcaaaaataaaaaaagaaaagtccacagctcagcccctcctctaaagagttgtacagcgcagccttccacggctcatagcttacagcaggtctcccttccctgccaccaccctcacagcaaccccactggctgagcactctgtttttatttattgtctgagcactcatcagtgcagctctgtttaacatgttacctgtatttccacccaaattttttttttttttttttaagaccaggtctcactctgttacccaggctggagtgcaatggtgcaatcttggctcactgcaacccctgcctcccaggttcgagcgattttcctgcctcagcctcccgagtagctgggattacaagtgcccgccattatgcccatctgatctttgtatttttggtagagacagggttttgccatgttggtcaggctggtcttgaacccctgacctcagatggtccacccacctcagccttccaaagtgctgggattaattacaggtgtgagacactgcacccagcctctaatattttttagaacatccattgtggtagcctcctgccatgctgaacagttggcctgggtggtgcaagttatctcccaattattgggaggtatcaattatcatttttgtttggactttacaaagttttataggttctaagtgatatatcccttctgcagtttttctcataagttctgtttatacagtatgtgattttgcagaatatgagttttttgagattatatatattgcaatatcatagaaacctttttgtttgataatctttgcttaaaataacctcatttattttgtacgaatgtacaaaaataaaacaatgtagtacttattggctgtttttgtggactgaggtagagatgtcaagaagttcaagccaaaaaaactgaaaatagttaacagaaacaggcaaatctcatatatcttgccctgattattttttcattagagtccctcctattgaggaaggttcattagcatgtgatgaaacacattgagggggattaattaggaaatataaaagagtctcaaacttctgatataaggtaaaacacgttaattttatgtgtctttaaaaatgtaattagaaccttctgtttgtcttttctgagacacgtatttaaaatttccctcgactcaactgataatctgtgattttgattttcatcccaaagtgacttttaaaaaagttttggggttagggggatgtggtggctcacgcctgtaatcctaggactttgggaggccaaggcggggcagagggcggcagatcacctgaggtcaggagttcgaggccagcgtggccaatattacaaaaccccttctctactaaaaatacaaaaactagccaggtgtggtggcaagtgcctgtaatcccagctacttgggaggctgaggtaggagaatcacttgaaccccagggcaaaggtattagtcagcagagattgctccactgcactccagcctgtgcaacagagagagactttgtctcaaaagaaaagttttgggtgaaaagtagaaaaaaagtcataactttgtgtagagacttttccctcctgtaattctttttattatcaaatatcaggtattatagggtataagccagtgttcttttttatgatttccagaagtgttaaattttccatgtcttctgcatttgaaagtaataggtttggaaagagaaaagctgttcattcttcaagtacatgtaagtttaagtaccttgcagactttgttttgcaggaagcttccttgccttctccccatatcacctctctgcacctcttcacacccatgagggtctttatagcagtgcagtccataaattgttttgaggtaccaataccagtttcttggatattttcttacttaggaacataaatacttaggctgccattgcgttaataaggaaatgctggatagtcagaatcctacattaacccgagcctaaaatctgtagtatcgcttcaaatatctatgtagaaagcatagtttattaaactaaacatctcctgtaatcccagcactttgggaggccaatgtgggtgaatcacttgaggtcaggagtttgagaccagcctggccaacgtggcaaactmtgtctctaccaaaaatacaaaaattagccaggtgtggtggtgcaaccctatagtctgagctacttgggaggctgatcacttaatttaaaacttaaaagacctaatatccagaatctataaggcacttaaacagattcacaagcaacaaacaaacccattacaaactgggcaaacgacacgaacagacacttttcaagagaagatatacacatggccaataagcatatggaaaattacccaatatcactgatcatcagagagatgcaaatcaaatccacaatgagataccatttcacgccagtcagaatggttattattaaaaggtcaaaaaataacagatgctgacagagtaaagggaacgctcatacactgctggtgggactgtaaatcagttcagccgttctggaaagcagcatggcgattcctcaaagaacttaaaatagaattatcatccaatccagcaatcccattactgggtatgtacacaaaggaatacaaattgttctatcatgaagacacctgtacacatatgttcatcatagatagcactgtccgcaatagcaaagatatggaatcagcctaaatgcccatcaacagtagattgaataaagaaaatgtggtacatatacaccatggaatactatgcagccataaaaatgaatgggatcatgtcctttgcaggaacatggatggagctggaggccattatcctaagcggactaacacaggaacagaagagtaaatactgcatattctcactcataagtgggaactaaacaatgagaacctatggatacatggaggggaacgacagacactggggcctacttgagggtggagggtgggaggagggagaagatcagaaaatatacctatagggtactatgcttattacctgggcgatgaaataacctgtacaccaaagccccatgacacgcagcttaccaatataacaaaccagcacatgtacccctgaacctaaaatacaagttaaaaaataaatacataaaaatttaaaaataaaaaataaaactgcaaacgtgccctgctttctggcagtaccccattccctgttccttagttttctctctggcacttatcatttatctattttattcattgtctgtctcccttcactagaggttcatgagggcaaggattttcatgttctgtccactgctatgtccctaacacttaaaaaaaggctttgcattctatagtcattcgatgaaataggctgaatttagctaaaagggagttcatgtcctttgaagaaacatggatggagctggaggccattatccttagcaaatgaacacaggaacagaaaacaaaataccacatgccctcacttatcagtgggagctaaacaaagaaaacacatggacacaaagagaagaacaacagacactggggtctrctgagggcagaaggtgggaggagggagaagatcagaaaaactacctatcaggtactatgcttcatacctgggttacaaaataatctgtacgtcaaatgcctgtgacacaagggtacctgtataacaaacctgcatatgtacccctgaacctaaaataaaagttgtttgtttggtttttttgtttgtttgtttgttttgagacagagtcttgttcttgttgcccaggctggagtgcagtggcgcgatcttggttcactgcaacctctgcctycttggttcaagcaattctccctgcctcagtcacccgagtacctgggacaacaggcgcctaccacaacgccaggctaatttttgtattttttagtacagatggggttttgccatgttggccaggcttgtctcraactcctaacctgaggtgatctgcccacctcggcctcccgaagtgctgggattacagttgtgagccaccacgcctggcctaaaagtttttttaaaaagagaaaacactttccttaccctttgtagctcattgtctatctaacacaccctgtcactctcatcagccttgaacttcttacaaagccattcaataaaatgaaaggaaataggtgcagtgggccccctctgattcgtggctttgatttctttggtttcatttatccacagtctaaaaatattaaatggaaaatttaaaaaaaaaacaattcataagtgttaaattgcatgccatkctgagtagcgtgatgaaatcttgccctgtyccactctgtcccatgcgggacatgaattcttcccctttgtccagcagttcctcactgtctatgcctccgacctgttagtcactcagtagccctctcagttattagatcgaccatggcagtatgggggtgcttgtgttgaagtcacccttattttacttcctaatggcctcaaagcacaggagtagcaatgctggagatttggagctgccaaagagaagccctaaagtgcttcctttgagtgaaaactcttaataaggaaagaaaaacattgaatgctgaagttgttagatcttctatctgttgaactgtgaagaagaaaaaagatatttgtgcatagtatataaagggtttcgtactacccacggtttcaggcatccactgggtgtcatggaatgtatcccctgaggataaggggggattactctatgtattttcgtatccttacatcacttacattatttttcctcagccttgttgaggaaaataaaaacacagaagccaagaaagaaatgagcaagcactggccgggcacagtggctcacacctgtaatcccagcactttgggaggccaagacgggtggatcacccaaggtcaggagttcaagaccagcctgggcaagatggtgaaacgccgtctctactaaaaatataaaaattagccaggcacagtggcaggtgcctgtaatcgcagctacttgggaagctgaggcagagaattgcttgaacctggaaggcagaaaagttgcagtgagccgagatcatgccactgcactccagcctgggcgacagagcgacactctgtctyaaaaaaaaaaaaaaaaaaaagaaagaaaaaagaaatgagcaagcactgaacacctactgtgtgcaaggcacttgatagccttcctgttatttcttcctcactacaatcccatgaagtagttcttatccccattttacaagatacaaaaattgactctcaaaaagcttaagaaatttgcttctagttgcacagtcttatagattttcacttttataagataaaagagcttattcaaatccaagtctgtttgaacctgacaaggaaagccttctctaaatagagtatctgaatccctccctgctcgaaagtctcctttatacgctcatgtttcaaaaatttcacattttttgagatatagatagtacccacccacatcacctctgtttttatggaaaatttacacttaagtggcaattattttaatcagatcgacatcctagagagtgagagttcattgaggaaagaaggaaggtacatttttggatcataatgaggagagatcttgatatttttgaaatttgttttgtcttcccatggtacaaagttttaaaagtacaaaaatatgaacagtaaattctcccttctctcccatccctgtctctagccacccactcctcttctgaggcaagagcagattctgttgccaccttcccaagcaggtagtgcctttaaaaaacaaaaaacaaatgttcacctactatatgcattaccatgcaccttacacttttcatttaataaatataccccagcaatggtgatagcagattttggaccagcagtggggataaagaaggtcctggtcacctaggtgcctaaagagaagcagrtgaagagagaagaccctggagaaatgttttcctgttttgcacctgcaggtgcttgacatgcctctgaaaatgatctcagtgctgtgcagttccacagctgcagtggtacccacaatgccaaaacttgggatgcaaaggggcgggggtaatgacaaaaatcagggaaggaggaaccatagcaaccacctgatctgcacactcatgtattttatatacctctcttcaatgcctagtgtccttagacagtaagctccctgaagacacaggctatgcctactttattcatcatcgtgtcttcagtgcctagcaccctgcttggtatgcattcggttcatgaatatatgagggaacctgctgctgctgttcagcattcacacctccatttcaaccccatcagaaccttyttcatgcttcctcttttgtagtgtctcagaaactcattctgttttcttcttcatctttttttttttttttttttaatggagtcttgctctgtggcctaggctggggtgcagtggcatgatctcagctcagtgcaacctccacctcctgagttcaagcaattctcctgcctcagcctccctagtaactggggctacaggcttgcaccaccacacccagctaatttttatacttttagtagagacagggtttcaccatggtggccaggcttgtcttgaactcctaatgtcaagtgatccacctgccttggccttccaaagtgctgggattacagatgtgagccactgtgcccagccttcatcttcatcttaaaacttcttccatgttcgctgtggctggggacatgatattcctctttccctcccagttgctcctaaggatgagcaaaaagctcttttcacgtcaggggttgtaccgccaatcactaaaaggaacagttgaaatatcaaacatggagaaattgcagtgattacaaaggaatgcaatggggcaccatacagatctgaatttgccagtttgccatatccaggctgtccctgttgcctctggtccaccttaagctaggtgcaaacccagttggaggaaagaaaggaagttatgtgttctctcttcaaggaagaaaccagataccagcctcaaactcttgttcttaggtcacttctttccttggtccatttcactcctcactctccattcaattaaaggacttgcagattaggttatttgcaagtatttctgtaatttattctcctactcccatttgaagccaccaagcctgtttaatattaaataagcaaatgcttcaagtactatggtgacttcttctgtgcctttgcaactaaagccttccaacagcagaggggagaaatttatatctgttatatacatagatgagtaatttgggaatataaaacaaatatccttcttagaaatatttaaacacagatgcttgattttgtctgatctttctctctcttttttttctctccaaacaactggttacccacacttgtacagtcatgtagagacaaaatgctcatttataattccagataccccatgtaattattgcctatgataatcaggtaatctttatgaaactattcctatacaattttcaaatctcagtttacaatcatgagtattttaccataatcttcataatgccctcttgawtatatttgcttaatatcattttgaatttagtgatatttaagttaacatattttatatgttttcatttcattagtaggcttttaaaaatttacttttttgtgagaatctgatttttgtgagactctgtgaacaaatatcctcactaattctttctaatggtataatgtgaatttgtcattgacaagtgttacaaaaaagacgcatagaaaataaaatattttaggtaatcctaagatagctcttccgcagccagggcaattgggctatgtgtctttgggttgattgttagctctgtcctaaatctctgaatttggagaaggaaaccctggatttgaattccagttcctcaacttactggctccatgttcattccttctttgtcaagccccctaacttccctaaacttcagtgccctcatcttaaatataatgacataatagtgtctctcataagattggtagaattacatgggataattcatcttgcatggtcaggggcacggtctcgggaaccagactgtgtgggtttgagctgctcagtcttggacaaaagattaaatatatctrtgcctttgttttatcatctataaaatgggaataaccatagtaccttattcaaaggttgttgtgaagattaaaataaattaatcctgtaaaaatgcttaggtttctggcacatagtaagggcttagtaaaaactaggtatttttacctggtatgtgcaagcactgtatrtatcctgatatactttctcatctataattctgtttctgtgcactagtttatatatttatttaatggaattattttctacagatttagtcagattttagaacacaaagcaagtggatacttagtagccataggggaatctgattttgatgtctcctacccaaagtttattcatatttaatattatatatacataagtcttattctttctcttcgtcctttttttttaaaggcaagatctgccttcatcttcggttttctttagtgcttagaagattgccttgctagtgataagtatttttgcttaataagtatatcttgactgtgaaatttgtcaccagttttgaaaggaactctggcagcaaatgaacaaacttaaatccttgtggccagggatcaaaggcaatctcaaaccgaattctataataaagagaagtttggagagagaaagggagtttagtgtaaactcaacttttgaaatccaaaggtatcaggctatcatgggaagagtgtgggattcagctttagccctggggtcacaaagtcatgggtatgctcttatataagtaacttaatcagatctctgtttcctcatctgtaatattaattcccttctcctatttcatagaaatgcttaaaatttttaacagaggtaatatatgggaaaatgctttgtaagctataaaattagtgtacaaatattagggtcactgatactctgtgacgcaattcaatgatttggtagaagactatatatatatgtgtgtgtgtatatatattttatatatatatatatatatatatatatggccaaccatatatctattagtagctctctctatatatgttttaaagccaggctggtcttaatcttgtctattgaattcattttgacaagaacagtgtaggatccattagtcctttacaatgaagaacatattaggtgagtcaatacttaattccaaaattttactttagaataagagggatgtctaacatcaattgattgaaggctggaggaaagagcgtggagagaaagaagtaacacactgctctgtgtttttgtgcctctgtctccagaataaaagtggacatgcccttcctcctccttacctctctctctctgtatccctttcagtacatatgtccaacactgccatacacagcctcgctgaaagtatcaggcaaagggagaaacagtgagcattcctacctccagccttgacaacaactatgaagtgtgttgctctaagctctgatcataagggaattagaagcactatgattttttaaaatcaaaatatgcctgtagctccaaaaaagaagaatttgactatagggtctcagctcactgctaggagaggtgtaactgattaaactctggtgcagaatgtatcaggatggaaggaatctgagaagtcaccaagttcaaatccttactttcagtccacagagtcatcctgctgcatttcctttttatgcctgcaaacaaaatgtttctggaactcatttattgtcagtgagtgctccctgggctctgaagcccagagatgttcctccataactcatcagaggcttgggtcatttctgagacaataagttactgctaggtcactgaacatacttggggtaggcagtggggaaggggattctgtgataagaaggtgatcatgtgttctctatttataggaaaatgaatcattctcagggtgatgagcatgtgtcattaaactgttttcctgatcatgaccttgcaccaagctgtttgccctctttgccctgttccctcaggctcagtggtcagggagggtgggccagctggccgagatgtgcagtccagtccagagttcaagaacagtttgaactgtgagactgagagccaagctgactaggtcagagtgagaagccattcctcagcatatgggagctgttagttagtgccctgaagctctctagttatttggggaaggaatgggagaaagcacttagatccctgctgggctcattacctttaattagcttgcttggtctggtggctactgcagagggggaaatctccaaaaactgcaaaaagattgtgcatgatggtgggggaagatactttaagaagggaagaagactctgttgagcttccacaaagaacaggttgttcatacctgaatgcacacagggaatgcacaaattttataaacaagaaggctgggtttgttttttttaagtttttctgtttttaaatttctgtttatttagcgggtacaagtgcagttttgttacatggatataactctggtctttcagtgtaaccatcactcaaatagtgtaccttgtacctattacgtaacttgtcattcctcaccctcctcccaccctcccatctttytgagtctccaatgtctattattccaccctctatgtccatgtgtactcattatttagttcttacttataagtaagaacatgcaatatttgactttctgtttctgagttatttcacttaagataatagccttcaggtccatccatgttgctgcaaaagacatgaattgattcttttgtatggctgagtagtattccatggtgtatatacgttacattttcttgattcaatcatccattgattgaatggtgtcctttgacttatcaaataaatggtgctaggaaaattggctagccatatgcagaacaatgaaactcgttcccctatctctcaccatatgcaaaaattcactcaagatgaattaaagatttaaatgtaatacctgacactataaaaatcctacaagaaaatttagaaaaaactcttctgggcattgcctagggaaggaattcattactaagaccccaaaagcaagcaaatgcaacaaaagcaaaaataggcaaatgggacttcattaaactaaaaggctttggcacagcaaaagatataatcaacaaagttaacactcaacatacaggatgggtgaaaatacttgcaaagtacacatccaatgaagggctgatatctagatatctagaacctatgaagctgtttttaagaacagaatgaggacatgagccaacacccaggattccagtggaaagtgaacagagcaggcacagttaatggaaaatgaacagagcaggtacagttaatggaaagtgaacagagcaggtacagttaacgtcatactttacctttttccatttgcacttcacgaagagatgagctttgatagttaacttctctctctttttctctctgttttcttcttgtgcaaactgggtgatgacattgactctcttcacaggaaagcactaagtgaggattaactaggtaatgagagcaaattggaagggtgatggagatgctccgcaaccttgctgatggatttctcccagcgagagaatctcttcaatgcatctttcatctgtgtcttacaggcagggtgtaccatcgttatctctgcattctgcttaagccatcccctccaaaccctgcctctaaggagctttggcctattccttgaaaggattcttcagttatcccaccaacaatcagaggcagcaggactcaatatccccctgtatggagaaaaactgagacaggagattgggctaagttgtcagtgattcacccccattcctgccctaaggaaaggatctttttctttccttttttttttttttttttttttgagacatggtctccttctgtcacctagactggagtgcagtggcatcatcatatctcactgcagcctctacctcccaggctcaggcagtcctcccaccttggcctcctgagtagctgggactacaggtacatgccaccatgcccagctaatttttgcattttttgtagagacagggtctcagcatgttccccaggctgggctcaagcgatctaccctgctcagcctcccaaagtgatgggattacaggtgtgagtcaccatggcaggccaaaagcatcttctcaaaaatctttcttccaaaatgtatattatacaaactttctggagaacaatttaggaaaataagtattcaaaattcttagaaaggtgcatgattcttgcccactgaattccactttcagcacatgaccattagtctttcatttcttcttctcttcttcacaccagagtgtattgccttcaacaaagaaactaaccacttttagacttgtaattaacctgtcccttcccctcatctgcccacctgactactgaaagtccccagagtctgcttcttagtgggacaccagccttctgcaaggcacttattctctggttatgaacctgtttaaggaaatctatatatttgcacagaaccatggaaatatagatgtgaacaggcttaagtgatcacaacccacattttttttttttttttgagatggagccttgctctgttgccaggctggagtgcagtggcgcaatctcggttcactgcaacctccacctcctgggttcaagcgattctcctgcctcagcctcccaagcagctaggactacaggcacgcaccaccatgcccagctaatttttgtgtttgtagtagagacagggtttcaccaagttgaccaggatggtctcgatctggtgacctcttgatctgcccacctcagccccccaaagtgctgagattactggcatgagccaccacgcccagccagcccacactttttatcagatgaggaactagagactctgagaagacaggtggcttatccaagagttcatacttattcaaggctacagaataaaccagaatctggggcctgtaactcccatatgggcccttctcgagttatggagacttaacggtgtgggacacaaaataggaagaagtagagtaaaactttataaagtaggaaaagaaataatgtttgtactatgtataatggcacttcaaaatccaccattaggagtgtctacagtttcctctgcataatttagaggctgaggccatgtacctcaattcagtccagttttctatccaagaggtgcaagctctaaaataaaggaaaggaatattctttatcagtcatcagcttaatctcaaaatattgtgtgctccataattgaccttcattagggcattatggacaggggcttactatatgctaagctatgtaaatacagatgctcctcagcttataatggggttgtctggataaatccattgtaagttgatccacacataaccctattaaaagtcaaagagcatactgaatgtgtwttgcatttgcaccattctaaaatcaatgtgtcccwtgtgtaaaatcagttgcatccgaaaagcctgaaacgtgtacatattctttgatctagccatcttattctaaaaatcaaaataaaatcaaaataaaatcaaaatataggtaagttgaactgtcataagttggggaccatgcgtactctgatagtcagtgttatgtatgaacttgaccaagccgcagggtcccagacatttgtccagccattaatcaggtgtgtctgtgggaatgtttctggatgagatgaacatttgaactggtagattgagaaaagcagattcgtctcccctatgtcagtggacctcatccaatcaagaccggaatagaacaaaaaggctgagtaagagggaactactcctgtctgactgctttgagctgggacatcaatcttctggccttcaagctcaaatgcaaatatcagctcttcttgagtcttgaggctactggttttcagactagaatttataccattggctctcctggttctcaggccttcagatttagactgaaactacactatcagcattcctgagtctccaaattgctgactgcagatcttatgactttccagtcattccattccttgtcataactctctttctctttctttctctctctctcctctctctctctctctctctctctacatatatatatatatatatatatatayatacatatatatatatatatatatatgaacagatacatcctattggttctgtttctctggagaaccctgactaatatacagttatgtgtcacttaacaataggatataytccaaaaatgtgtcattaggcaatttcatgatttgtgaatatcatagaatattcttacacaaacctggatggtttgctgcacacctaacctgatgcacactgaggctttatgggatagcttgttgctcccagactagaaacctgtacagcatattactgtactgaatactggaggcaatttctaacacaatgacaagtatttgtgtctctaaacatagaaaaacacagtaaaaatatggtattataatcttatgggaccagttgtatatgtggtgtgtcagtaaccaaaatgtcattatgcagcatatgactgtatatatacatttacacttaatcctcacaaaaaccctctgaaataggtactattgttttgattatcaacctaactttaaaactgggaaattatacatagactggttaagttcctcgcccaaagctacacactgcatctggaaggagtctgaattcacccagataccgcgtgctccatctgtttgattcacattctcctaattgtgtcccaaaagcctgaaacatgtgcatattctttgatctagccatcttatcctaagaatttaccctaagtaataatcatggatgtattcaaatatatcgcaaaacatttataacagtaaaaatatctaaacaacttaaatgctaaacaataataggcgattggttaaatgttctatgatgtagttactcagtgaaatactaccttcattacaaaccatgccctcaaggactatttatttacttgggtaatcattcaagctatatagatgagagtaaaaggcctgttacaagcctgaggagagatggtaactaaatatactgtatgctcgatgagaccctgaaattacattttaccatgtttccttaggcttgtagcattccatttttacttctattctgaagcagaaaaaggagattagataaaaactaagaaaaccttaataaaggccgggcgcagtggctcacgcctgtaatctcagcgctgggattacacacatccctgtttttaaaagtgaaatctgccttctatagaacacattcccccacagaaatatactacagaaaacagacctaataaagtggagttttgttcaaatgcttccctcacaatgatgctttaatttgctgaggaacatatgattgatcctagttcacctgctgaacatgcataggcagtgtgcatctctagcacactgattaaaatgaatacccagaggctcaacatgatttcttattaatcagaacatacacaactttgtgaaagggaccttagagccattctctgccccagggtgaactgggacacaggtatagaaacctccaggactctgttggaagagtttttcttctaggttttttttttttttctgttataactgtcctttccaagattaaatgatgcctaggatatcacatcgttcagaagaggttgaaagagggagttatttataaatcctgaaggttctaggaggtttgggcttagaccactttggactcagagaaggctgtgaggtaaggcatgttctaatcttgttgatggaagtcctaatgtgtcttagaagatttctggtcatcactgtctttagggactcagagtcttcctctaagttagtttcaggaccctttgaagtattggcattgctggctcagtccactggctctttggccttcacctgtctgcattatggttatagctgagatgccaggaaaaacacaagatgagtctgttcagctcgaagctgactcaactggtttctaccacctcaattcaaactaggaatgagatatttttcttcctttgctttttagggcaattaatgttcccacatatctccctttttcttgccatttcttarcatcctaaacactaattttgcaaaataatgttgtaaatgctttgcatagtcactatcttatgttgcccttcctgttcacaagacagccgtccgtgtcagttgaagatttctatagatatgcatcatctctgatagataaaggcatgtttcagagactatcctggtgggagtattttacttttgaaaccaactaaatctggttttgctcctgtttgtggtactttatttctccctgtagcaggagagtagtgccaacgtgcctggaaaatcaagtttcaaacctctattgcattttaagccatgttttagaatcttagggtcaattaatattagagttcgacaaaatctctgctctcaaacaaaattatatacaaaagctcagtaagtaaaccaggtaaatgttaaggtgcttcggttgaatctaggtttaggagtccagagaatctaactcaaacctggcagctggaggatacccaagaaactccctgggcttagtagtgtacagtgcgaaaaacagcgatctcatccatgtccttcattttagggagatgatacctaaactttgtgggttttatttcaaagtcacatgttaattagtggcattgtgagggaagcatttgaacaaaactccactttattagatctattttctgtagtgtatttctgtgggggaatgtgttctatagaaggcaggtttcacttttaaaaacagggatgtgtataatcccagcactttgggaggccgaggcaggtggatcacctgaggtcaggagttcaagaacagcctggccaacatgatgaaaccccgtctctattaaaaatacaaaaattagccaggtgtggtggcacgtgcctgtagtcccagctacttgggaggctgaggcaggagaattgcttgaacccggaggtggaggtttcagagcaagactctgtctcaaaaaaaaaaaaaaagaaagaaagaaaaagaaaaaggatgtgaaaggaaagagtttgcaaaaaaaaaaaatgcggcaatcacaatacatttatgtctattcatattatttgaatttgtcattttcttcagtgattttttttccttgggttgttcttatttctacatcattatgtttattatatgaaggaagcagtcagcctcatgtttattctctggtagagaagaggaaaacagtaatttttgagcatgaatgcataagaccatacagtttatggaaatggctgtagcttctctaacctttcccctttcatacayacttgtttccatgtacacttcattccccctttttccccctttaactctctttgtatttgtatccctccttccctatgccctttttactcaattcattccctacatcacaacctgtggtttttgtatctgatcatagttttcaccctattgaaaatcatggctggccaagtacatgttaacaggaaaattctggacagtccctttgtacacaaaccttactgcttagtttcatctgtgcagattgctgtatactcagccctgcagcagagagaccacactgcagcctttagtaggaaaaggataggaatgacaatacactgcagacacttycgtgagtaagttgctaaagcgtcagtaaaacatcatggtgaggcctctgcaatcagcctgcttagrtttaaatgacaattctgtcacttacaaatatataaccatttggatagttatgtttgcactttaagcctcatgttagttatctggaatagtatataatattacctacctttagtgtcatcataagaattaaatgatttttgtgatataaagtgttaagtgtggtgccagaccctggcaaagttggtaattgtccccttccttccttccccgctttcaccttccttcctccctccctccctcccttccttccttaattccttctgtccttccctcccttcctcctttcacctccttcccttccttccttctttccttctgtctctttcacatgccttctttctctcttcccttccttccttcccctcaccattctatgagggcataactgggagggttaatagaatggatatctaaagcagcgattctcgaatataggcttttaaccagcagaatcagcattacttgacccgaaaacttgttagaaatgcaaacacttaagtctcacccctaagctcctgattcagaaaatctagggttagggtttaactgtctgtgttttccttgtttttgtttgtttgtttgttttgycgttgttgtttgttttttgtkgttgttttgttttgtttttgagacagggtctggctgtgttgcccaggctagagttcagtggcacaatctcagctcactgcagcctcaacctcctgggctcaagcgatcctcctacaacagcctctgaagtcgttgggaccacaggtgcaccaccacgcttggctaatttttgtatttttggtagagacagggtttttccatgttgcccaggctggtcttgaactcctgagctcaagcaatcctcccaccttggcctcccaaagtgctgagatacaggcatgaagtcactgtgcttggcgttttaaccagcctgccagatgattctgaatttgaatatyctggtgagaggttttaaatcatgcaagtggctgtctgcctccagttaaggtaaaaagggaaaggcctcagcttacactgtggttgagccatatgacaggacatacaaacactattaatattactagagaagcaaccagcaccgttttgaatagctcagtctattgggggtgtgccttctactcaagatgtaaataaggataggaaaaatagcactagtatcaactgccatacaattatttagtcacccttgggtaactaaacagcataggtatgttgatcaaaatgcccttgagtaattgtcagtggaattttgaactctccccaattcaataagatactgctgcaggtattggtgaggtacagggagcatctaaatggactgtctttcattgtcttccttgaaggttctaaatctttgtttttctggagaatattataggatagaatgtatatcagaagtgagacttgggagacctgtgtgacctcccaagcatgacaatattcacagatattcagatccatagaacacttcangaaattgtctttatgttcaaagatctcatagaacatttagttggatacccttcccacacacatctctccatttgataaagagacactatcttttcaaactttctttttggtctttacaagaagaaccctgttaggatattctcaagatttgttctagtcacacgggggtgaaggggaagggggggtgtgttatagaagtagctctagatcatttagcttaagagttaaattttttgcaaaaatactttgtggtggatttctgatgccagtccgcataggacttttattatcgtaatagtgttttgtctttcttttttaagattaggaaagtatattcaccataatatttgttgttaatcacttattttttatgcacccttttccaaagcaactatattgtccttatcttgaaaaatgaaaataatagcttccagataaatccttatgatagttttgctatcactagatagtggcagagggaaacagaggaaaaggagatctatgcattgtctttgaaagtcaagattattatactaaatgtttttgaagcattttgaaaatacagcgatatttacttataattctcaactatattacagttactggatctaaatgagaagtttgttcatctgtaaagtatttgaatgctaatggtattcttctagtctagtgcattcaattaaaatataacgtgtgttacatatgaagttaaaaatgtttagtaaccaaattaaaaaggtaaagagaaataagtgaagttaattttaataatatattatctttaacctcttttaataatatactctctttaactctttaatatatttaataatatattctcttttatatacatagaacattgtcatttcaacatgtaatcaatataaaaaatatcaattagatattttacattctttttttcacattaagtctttgaaatttagcacgtattttacacttacagtacatcttaatttggactagatgcatttcaggttcccaatagccatatgtgtctattggcgttcgtatcatatttatcatggcagttttaaatgtattaaaatgataagtctataaggtatcttcttaagtaaattctcccaagtataacagatatcagaggtaatatacacctacaaataattattgctaaagtaaaatttgtaaagctattgactgtcagtaaatatgtttaagaaacagtttttcgtattactctaagattgttcttaaaaccagcattgcagttcagtagacaagtgcagatatttgaaataagatgtttttatactacctatgtttaaatttcatgagcttcatccagcactggattttctggattctgagatatgctattcacatttcaacatttatgaaaacagaatacatcttacaattaatgtgttcatttaatgtaatcatacttcttgttttcctgaaactgagttggaaatcatcatggaaaataggttcttctcaacacaggaagagttctcagctattgtatagttgtgtttttgagaacatgcttcagcacttgagagatggatttcctagagtttttcttaaggatcaaaattaaaaggtggaaatatacaaacgctaaataatggaattaagcattggccttggataacagaaggtgaaggagataagagacaactttctgttccagctccactttaaccacaggggacataaatatatgggaccttgtagtatttaaccttgttaatatctccatactgttttgcagtaggygttggaacagagcttcacatttttctggtggaggagccagtgatctctggatggtgaaaatattctctaaaacagactccacaactacaatgaccagtacaatgtgttttctatgccgctgtcctctgtcaaggggcatcacaagtggctggcctatattcatgtaaaggtagaactagamcccaatcaatgtgccctataaatacccaagtctttaaatacccttagataataaaggtaaaagatgcaagaaaaagaggactgggagagtggrccaagtttatagttctttcaaagtctatttgaattatttaaaaccattctttttttgttaatagattttaattctcatacatgtcacatgtttcttttgcagaattcaaaacatttttaaaaacacccatttcaataatattgcatgcaaggtaaacaagaggttagaataactagtacaacataacgcagcttgactagaatacctcgtcataacacaagtacatcttcttttacatttatgcaaagtgaaacattgtctgtctctctccatagtccagaaaaatctgtggggtaattgctcattgtcccttcacaccctgtttatattgcgcgtcttctattttaatagtcccaataaacagatggaaccacaaaaacacagccgggatggctcagttggtcaatggcatcagagaacttaaagtgcctgatgctgatgactcttccagaaggcaatcctcttatgagggtcagggtctagagagtccacgttgctgctcgtactctctgtgtttaattccagctaacatgacaaagtgcaagcgtatgacaaggactttcagtgtgaccatcagctggaagaagccaagtgcgtacagctcccggtggggtggcacatgctcctcttgtgacttaatggtggcttgtggctccacttcccttgggggttgtttttgttgttcttctctcaggaccacatttattttgatgttttaaaagagaaagaaaagttccaaaaacttcctttctcgtatttcctctttgagatccagcaaaatttctacaactggccttttccagatggcttgcccagaattgctgagagwttgaggcacctcaagctctgggctcaacatcgaaggttctttaaatgtgccttttatcctttagtttctgtcacttgatgatgggtgaccaccctcatctctctctctctctctctcttttttttttttcctactaaacatgagattactggaaatatttcatgattggatacatgctattggttaatccatttaaccaaactcccatcaatggatgtggagtgtttacaacatttttgctcttataacagtgcttgacaatgtagggatttgtcaggttttaatccaaatagggctttatgatacttgccattatactatcagatactttttcccactgatatggtttggctgtatgtctccacccaaatctcaccttgagttgtagtcctcataatccccatgtgtcaagggcgggaccaggttgaggtaattgaatcatgggagcagttttccctcatgctgttcctatgatagtgagtgagttctcaggagatctgatggttttataaggggcttcccccttcacttggcactcactctgtcctgccccttgtgaagagggtgcctgcttctcctttgccttctgccatgattgcaagtttcctaaggcctccccagcagtgtgaaactgtgagtcaattaaacctcttttctttataaattacccagtctcaggtatttcttcatagcagtgtgagaacagactartacactcatcttttgaatacattatgtgaagtacaacaattttttccaaaccaaaccagacctggctaaatcctttactatagaccccaagattgagagagagggaaaaaggaattgatctgaatcaaatttgctgttatcaagaagtagggtagggaagggaccaatatgagatgtacgaaaattggctcccaaagtacagaaaaataaagatttgacttgcctactcctggcataccatttgtaggttctggccaacatctgcccttctctgagcctggagcttctctctttcaaatgggagataattgctgggcagctagagctcacaggcacgccgcatgatgagtgaggtcatgttaataaagccctgggaaagaaaagcaatgtgaaacagcagggctattaccgttccaagacgattttatacaagtgaagcttaagttcagtgtgatgattaacaagctattagagccaagttattgattcctctatctttagagtagctaatgcagtgtgcaccaataggccacagaccccaagctttccttcttcctgtgctcctgttctttgtaatgatgctttccttaggaaaatgaaaatcacttcgcatacacagtgcaacatctttaaggcaggtgccagcagagaggaaaaacacctaagctgattttgtgtgtttttattattttttctgataataaagattaatgcagatacatgaaaaaaacaaaacataaaaagtaggaacagaaagtcaaatactgcatcttctcacttataaataggagctaaataatgtgtacagacaggcataacagaacggaacaatagacactggagacttggaagggtgggtgagtgagcagggttgagggatgaaaaattaccttagaggtacagtgtacattatgtggatgatgatttcactaaaaccccagacctcatcactatgcaatatatccacataacagaactgcacttatacccataaacttatatttaagaaaagaaatagaaaaaagataatttttttaaagtagaaagagggaaaaaagtaaagcatcatcccaatttctttcaccctgaagcagctagttttgctaatatgatcatatacctatccacacatatgtatatgatcatattaaacatattagtttataacttgttctttgttccttttctaacatactcctcacaaaataatatcattgatagtttcccatttcaattaaaacagatatcaatataatttatcagcaaaatattttatggatgtgtgtacagttttggttaatccatttaaccaaaatcctcttgatgaacacagagtatttacaacatttttgctctcataacaatgctctgatgaacctcatgcattcatctttgagcttttgaccaattttccttctgtggtaaattcctgaaagtagaattgttgggacaaaagatttagagattttgtatctttaaacatattaccagtttgccaacccaaagggtcatatgagattactttctgcctacagtgtagtaragtgccagcttctcccaacaaccttgccaacgttgggtattgtcaattttttggctctttgccaagctgataggagaatggaatgtctaatggtttttgaattacattctgactgtgctgcatcagactgtaactgaatgcagttgtgatgtatcaggggacctggtttaactcagcacactgtttgaatctgtgtaataactaactatgatataatcaggctttcttgcagttttgaaaaagaagccaaactttcacatggtttaaattactctctcatttacactctccatgtgtgagatcacctgggaagccctttggagatgcccccagtgacccagtacaagttgtcaactgcactccccatgaaagagagattgttctggtccaaaccctatgctctagaggagcatcttggaaacagcactgccctataattgatattgctccattgggtggcctgtggtattcaattcactggaaagtatcaatccctttgccttcagcaataatattttcacagttttgatgtgttttaaaggttattgtctccaggacaggtaattgaggaggcctcacacttcatcagaggccatttcatctttattacacagccacacacaaggcagcattttctcctttcactgatggattatttcaagatttataaggtctggtctacatgaaagcaaacacatgtttgggtacacagtcaaataattcaaagatatagggtcagcaggatcctaatattaaagtcaggacttccagcctgggcaacaaagtgaaatcttgtctctacaaaaaatacaaaaaattagccgggcatggtggctctcgccagtggtcccagctacccgagaagctaaggtgggaggattgcttgagccccaggaagtggaggctgcagtgagccatgttcatgccagtgcactccagtctgggccacaaagcaagaccttgtctcaaaaaatgataataataaataataaaagtcacaactttttcctcttctacctgtgccagagacccactacctaacccacatacacacagacacacacaaacacaccatacacttattcctttcttaaaatgtggctttcaaatatttgctttgcatgcagttttctctgaagatatgaccagtttcaagattatctactctaagttttctgactggttgtcagtcagtcagtttggaaccctgccataacatattttcctcaaattccttgcagatactggaataataatgaatgggaatgttattttgagccgatatttggaaagtccttatttggaattctacaagtttatgtctcctgcccagttcctaagccctctttctagataaccatccagaagataatcatccagcagctatccgggtacattcggctgacttggttagttgggtctaagcagtatatccatgagttctaactcgggtttctcaaactctttttcctttgggtttctcagactcttctctcaaactcaaactgccttctccagtccattgctaaagcttgtatgacctttgctttccctccatttcttgacttgtggcatccactagtcctacattgtaggactagtgtgagcaggtcactcagcctgaaagcactcaccctgggcctctagagctaagttgcctcaacacacttcactatggcttctcagagcacactcaccttgaatgtttagaaaaggtaatctttttggggttcaatgagatcaaaagcacggataccaattttgggatcaggaatcaggaaaatctgggaaatgaagaacgaaatgaggccttaccattttgatacaaagttcatattcaagtgagtcaggagatctggtttaagttccagatctgcctcttactagttttagaatcttgggcaattctaggctggacgtggtggctcacacccataatcccagcaatttgggaggccaaggcaggtgaatgcttgagcccagaagttcaagacatgccttggcaacataggaaggccccatttctacaaaaataaaaattagccaggcatggtggtgcattcctgtaatcccagcaatatggaaggtgggaagatcacttgagtccaagaggtcaaggctgcggtgagctatgatctgccactgcactccagcctgggtgagagtgagatcctctgttaaaacaaaacagaacaaaacaaacaacaaacaaacaaacaaaaaaacaaaaaaaattggagggaatttagttcatatatttgagtctttgtttcctcatctagaagatgtagtaaagataaatgaggtcatatatgattgtccctggcataatattttggtacttattgaaaagcagctattgttttaagtcctttgcatatacatttctatgatttactatatatcagtagcatttctccaacccatcttggctaggcaagcaccactgaatatgaaggaggccaaatagaatgatactatccaagctgcaaagaaacaaacaaaagaaaacatctaaatgcatgcctctttggartggcatttgcatccgttgccaatatccatagaacaaatgccttcaggcaggaagaagttgggataatgtcaatgtttttaatagctgtagtagagtcctatttagaaagcagtaattatctctccatattgattttttacatcccctcaataaatccagaagaaatgtgaagaccatctgtaagtgtgatttttaccaggatcagactctaatttgcaatggctatgtgtctgtttgatttagatcaggggttagcaaactgcagcccacaagccaaaactacctcccccatctatttttataaataaagttttattggaacacacccatcacacccatttctttatatctgtggctgctttcatgctaccatggttgttttatttaattgtaacagagatctaagagatctagagcccatattgcccacagagctgaaaacatatgtacatctaaccctttgcaggaaaaaacttgttaaatcatgattgagattatagtagtattatttctgattgactaggtagtaattggtcccagcatgtaaagtttctaatattaaagtcacacgatagaggagctagaggcttaagaaaagtrtacatgaatttatttatttggaataggaagggaaacatccctggtatcatcatgatggcatatagaggcagggctgagagctagaatacagaatacgtcctttgctagaaacagtttctcgggctgggttagagtgggtagaaactatggatcatcctgccgcaggtccaagtaaacaggatttggcgctctacataatggctataaagaaacataaaggtgatttctccaagtgttatgctaggtgagaaatatttaataagtaagagcaatcagaattggtcccatattgagaaagtctgttttggagcccagactaaatagactgtgcagtgagaaatgaaaggtcaatttaggtaacttcatttagggcaaaatcatgacttaggaaatcatgactagataaatatccagtgaagagcagggagagaagattcatcaatggccgtaggttgctgtgaactacagaactgaaacatcaatgtatgaataaagtgctgtattgatggacagatgtgtgcatttttatgtatatgccataaaaaatctgaatcaatttctatttgaaatagagaaaagctagttcagatgttagaaacttttctgacgcaaaatattgtgtaattcataaacaattccttgtgttttagtttacagtatgtccagaatataggacttgcctactgtaatgtataaaacaaaagaacttcaggttgatttatttgttaagtagtagacattctcctaggatgtttatgtttgtgaagatgataaatggaagaatacatccacagaaaatgtagacacaggcccttctctcccagtctcaacaccacaccctacacacacacaatgccttccttctaaccttgtctatactgtctctgcaacacacaaagcatatgcccaggataagcttctctttcaaccacctatcaggctttcaacatgtggtttgaaaagatagtgacattgctatgctctgacatacaccgtaatgtcagtacagcagaagcaagtggaagattctacttttccgataaagatcagttgctgtttcctgtcttgaagacgaaagttgagcaaaagcaaaggtcatctgtgtttatattaacaatgtaagagttatactacattttcgcaacaacatcaggtcattatttatccacttgtcctttttttttttatcattcctttgaactgcctgcatttgcttatcgtgatatttctcagtctgtaaacagcccgagtagctgttctatttctctaaatagagtcttaggtcattttattatccagaattgtaagtcatcagaatgcacccatctgttgtccttccacatctgggctaactttaactctttaagcccatagaaaaagtagaaaagccattgtgatatgagtttgatacttttttcctaccatactgctttccagcatatggttttccctgaaaaatcacaaggaaatatttacaaatatcttatttttctttggacatggcattaaacgtggtagatcctccatctccacttggctctttctgattttctgttaccctaattatccttcctgcgatcacagctgctcagagcctcttcttaccaatttaaaaaacctctaaagatgtgacggctgcctttccagtggccaacaagcagatttccatagcagaggagctgcgactggggcagagagccaaagacagcttgtgccaacagccttgtcaatatgccaatcatcttgttacagtttattacatgcgtgacttgattttcttgcatgtgcgttttagaggtaacaacatattggtaaacctgttttcaatccttttgattaccttcaatttgatagctccttcagtaatgaagaaaaaaatgggctattgtgtttgaattacatttatcaaatgattctaagattgttctaacgtgtgcgacaggataagctctcttttagtcaccaattggagaaatatgctcagtgtcaaggaaatggagaaatgcctcattatttatgttgactaatgtataaatacaatatgaacaggggcggtttcaaccctgcaaacgttttcttccaagttgctctgtattttagctagactagactagattgttcagtggtcacaaactaccccaaaatcttaacagtttacaacaacggaagtttattttctaaatatataacatccactgagtgttggccagcgttgactgggggttgttctccacatcacgtccctaagggaccaacagtgttggaggagtctctcttctcatattgatgttcaccatggcaaaggcaatgatcacagtgaaccacatgctacattttaagcttctacctggacaccacacaagtcacttccactcccakttcggtggtaaagcaagtcaattcaagtctgacttcagcatctttgggaaatataattccaccccrrgaggggaagcagatatgggtgaaatgtaataaaattcacctctcccataaagtcctagtagcattgttttatttgagtgaattcttttttttttttttcttccttacagatcctctttaaaacatcagcctggaaacagtatctgtagaaatcagttttgttagttctaaagcagggcttcattgttgggatgtgttgtctgccttcgttagcagatttcaatcatagccctaaatggaagacacattttagggctgttgctgctatagaactccaggtctttctgcttaacggtttcacacttacgtgtgaagggaggacacccttggccaaaagaaccaaggctgctcagttagctgctggttgtcctccagcaaattcctagaactaaatacctggtgctgaggtgtcacgactcagcaagtcctagaacctgtgcttatgacagcactctgataattcccggttattgcatcactccctgatggaaacccagcttttatttcagcaaaagtaatggattgttccagacccctgacctcccttgaagatgtctttttgttggatctggccctgtatattttccagttggttcaagacctagagaaatttctacagactctctcataccaggtaggtttttgtttgtttgtttgtttgttttgcttttgggataggacctagtcatattcagtccacattggaaagcataaattagtgtaacatacataagcttgttcattccactccatgtgttaggtttttgttagtgaacactgactgcaaaaataccaaggtatagccttatgcaagccaacatagtcacgttggacattagtgatctgagggtggaagtgaaatgaagtacggttttttttttccaagtcaactaaacgaacaggctgtatgttttacaatatgaattgggttgtgatatacaaagtgtttatccaaagttaccctcctctttgttttttagaatgacaagacccaaatgggagaattaggccagaagcaacaatgccctcaggcttagtgaaattgaccaaagtttgaaggtaagtgttttcagaccctggtttcctaggaccaagtcttggcctcatcaaacataatcacagtctccttttaccactttggcccaaacactatgaagccttttgcccactggctcagcttctcttgccatatactgattattaatgccagtaaaatacctaggcaccttggcagtaacttacgcaaatatgtatatttctaattacagggaaattgttagaacatgacttggattagagatacacagctaataattcaagaagaaataatgctttgttttcagtagaggaaaataaaagcttcatttgaataatttttcctcctttctctccctttttgttttgatacttacgcatgggcaataccgtaaactggcaataaaagaagttatcgcaaacagtgtggccatttctcctcagacactggacatcctacatctgttatatggtttaccatccatccacttccttgctatagctccaggtccacaattctttgtcatgtcattgctcttgacctataccatgactgataaccatgtacatttttaagaaaaaaatgtaaattaattaaaataatttaaaaacacatatccatatggtgtttgtgcatatattttgctttttctaatcttatctttgtagttcaaaaaggttaaacctgaatgtgatatgtgtgtgtatggaaactgaatgcactataggttcaaataggcaaggaagttgcttagtaacatcctgttcttgactgtgctatcataatttgcattttccaataaagtgtgtttccagccttaggacagtgctactattattgctggtggattttgtaatgtaagcttgactcattcagtgtcaagatcacctaaggccaaattcccattccacacgaattctctttcaagggatgtcctacccttcaagatgcccttaagaattctggattccttaaatatagaactatttatgcttactcataaaacagggaatgttataatatttctctgcttcactgtgtccaaggaagtagagaaatctggtaccatatttatgagcagcaataaaccatgtgttttgctttttcctaaaacaagcctggcaaactgtttaagaacacatgtgcagagcttgggcacagggtgagagtttggtggcacggagtgaggctagaggtgggcgtgtggagagtctgatatcctgatatcaaagcaattccattcagacttaggcctgagctgctcccagtcatccaagtcatttttactaatatctgacaacttgcaaatattgtgttacgttcaacactgaaaatgaggactgtgcatttccttttgtytaaatgatgattaaatggtgaagcagctacagaagtattgactaacgacagcatccatttactagaaaatatgtcatttgctactgcaaacatttatggtctgattatacctcatgttacactgcaatggtttgggttttttttttttttttgtatttttggtacatcagaaacacttttcccaatgtttgttagtttaagcattgktcaacatttatttattaagcattgactttataaaataggtaccaggaatatgaaaatgagtaagatatgttccctgacatccagtagctcatagtctagagatgtcaccataataataactagcatttattggacaccacctgtgtctcctgaagcctgttacctcatttaattttgacaaaaccttatgaagtgaatattatcacacaaacacacacatttagagaatgaatgtgaggctcagagaagttaaacacattgcccatgatcacagaaccagttagtggcagagttgggatttaagcccagatctttctgattctagagcgtatgttctatctatgaagctcttaccgattttattttatatcaagtgaactgtgtaatacataaagtcactcaggaaacagtactggatggggattatgatactaggcagtgcttactctagcaaataggtatcagagccctggcataggtcctcacttttgctaggattctgtcctactccacccttgctgataaacgggaagccacacgtcctggtccagcacttattctcaggcctcccagggacactcactctccatcacgtagtctcttccctaagtagtctgtgtttccctctgccttgcgggtaacttcatctgtgtgtaccaaacctgtcacccctcttagtagtcctcaaaagacaagacttcaagggagagttaatattctcagagttcatcagaaatacctgtttccaaggtcaagacccaccttagaaaggaggtcttcatataccctgtctgtgcttattttgtgttttcacaacacaaaatattttaacgatgatttaatttagttgtgtattgatagtctctgtcaatctctcagggttttttttttctgagggaaaaaattacattttgtaattttttaatttagaaacaacagcaataacaacttgagtcggtgacttctgaaccatttttgttctgattatcactgtaaacctaaatgtgtgaacactatcagtagggataatatttaccctatgggactgttaagcaatttaagatgagataagaaatgtcacagggaaaaggtgttactccacacatggtagtcgttattatttattgggttgaagtgttggcctcccaaagggcaatggtgatttaatagaatataagcaactaaatcccaggttaaagcagtgaattcctaattgtagaattttccctgttaaactatcaggtgggaaaggcctgtcaagatgtatatggaaggagtgagatccttgaaataattaatacacctggtataactcccatcattaggtaaacctgggctcatccctactagacagtaatagaaaattagaggataaaaggatagtcacaaaaataaatagaatatattgaaagctaactatgtactaaacagtgttctaggcatattttacatttattaattcatttaaacctctcaactccctataaagtagacattactaattatctcccttttacaaaaaaagaaatctgaacctaagagagtttaaaaaatttgcccaagaccacataatcagaaggaagattttgaatctgatttttcctcacagcaaagtccatgcattttccactttatcacaccggtttttgtttttgtttttgtattattatttttgagacagagtctcattctgtcacccaggctggagttcagtggctctcagctcactgcaacctccgcctcccaggttcaagcgattcttgtttctcaggctccagagtagctgggactacaggtgtgcacttgtattttttagtagagacagggtttccaccatgttgcccaggctggtctcgaactccttttactcaagcaatcctcctgcctcccaaagggctgggattacaggtgtgagccaccgcacccagccaatcacactgtatttaatatcacaacgaagtgcagtctgcccttctcaggatgatcttagatctatttttcagcaagtcgcattcgggtggagcaaaagcttttaaatggtggtcaattacacaatgattaaatttagtttaccattataggtcaaagggaagtgggaagagtttgatgactgtgtatttgtcatgtttctagttatagtgtacaactctgcctgtttatctgagtgagtgccaagaggtgaggtcagggcaggggctcttgcacatggcacatactatctgccccacagctattttgacttggacagtcattgtgctgggtggtaaaaattccagtgggctgggtaggacatactggggccctgtttcctctcatctgtgtttgagaactaggcagcattgcatcaaatggaaggaacaagtgatgagacatcaggaaaatatcagaatgaaagagaaatgcaaggctctaaaggaagttccaactcacttcgacaccctccagttagcaaagaggtgacagaatcccaaaagggcaggggagagattatggatagcaggctcctggaggaaaaactaggtatgtccagtagcagatctgtggaaactattagaaaccgagctaattgtggacttcttagcatgcctcaggaaatgggaaggaacttttcccttttgggcttgtattttttccaattttccttgttcgggaaataattaattctttaagcaatgtaacctcctgctgtgatttctcaattccacaaaagagaataattatagattaataatggaccaaaatagaaaaagctaaatgtgtgtagcagataagtaggaaatgttctgtcttgtaaagggtattgtttcggtgcccggcaacacagaaacaattctcatctatgcagctctaaatggatgttagaattcacccctctttcctactggtataaaattttcagtctcagtaggactaacgctttgacacatcctaaacctcaccaggagtaggaaatatttctcatagcataaatattttttcttccttgaactgaaaggtttgtggccttccccatgcatgataactgggcagttttcagaatatacctcacagtaaaacttagacttcacacctgtaatcccagtactttgggaggccttggtgggcggatcctgaggtcaggagatcaagactatcctggccaacatggtgaaaccccatctctactaaaaatacaaaaattagctgggcgtggtggcacgtgcctgtaatcccagctacttgggaggctaaggcaggagaatcacttgaaccagggagtcagagtttgcagtgagccaagatcacaccactgcaccccagcctggcgacagaatgagactccatctcaaaataaaataaaataaaataaaataaaataaaataaaataaaaaacttagacttcaagttttaactattgaaaaacttccatgaattgggtacagtaccgagctaaacgttgtatatatgttatttattcaggaaatattttcaggtactatgctgagtgctaaaagcattgttctgccttttaatactaacaatgcctgtgaaaaatatgtaggattatccagactttataaatttaaaacattaggattcagaaaagtaatatgcacatgctcctatactttacatgtgacagactggaatcaaatggtttaggatgccccgaataactgaactcttaatgccccagaagcccagatcgggacccaccactgggagttacagccctctggagccagcttcagaggtgcacaggtttattctcttccctattcaccagtgaaagaagcccagagcctccattccaggcactctgtgcttcccaaagtaacaattacttaatttgacaagataatttaaagagattgccaaaataacttacaggagattgccagtataatcagccctcccatatctggggattctacatttccagattcaaccagttgaagagagaaaatatttgaaaaaaaaaatttaaaataatacaaataaaaacaatacaacatagtatttatatcatattgggtattgtaagtaatgtagagaccatgtaaagtatatggaaggatgtgcataggttatatgcaaatatgctattttatgtcagggagttgagcatctgcagattttgatatggaggcaggggtcctggaaccaacatcccatggatacctgagggacaaatgtaatcaccatgttttcccaggtggatttttaacagtggccttctggagacactatgcctatggtttagtctaattgttaaaaattgggataggtgaagaaagatggcagataggcacaatgggaggcagatatttccataaatgccttttaaatcagatcctttctagattcacttttggctctggatctggaagctatcatcatggcaaccccagagtcccattggtttgcctattggttaggtgggccaaggtgtccacatatcacaaaagagttctcaaaaaatttcttcccaataacgagggagatttatatttaagagcacctttagccaaactgaaggaagggaaagttcacaaatatggtaatagctcaagtcaatgaattagaggctttgtgtagggtaattgttgagacctccccagttgactgaccaaaacaattctttgttggctagcagagttagagaatagaattttgcataatccaagtatttcatataggtcccttctgctgttactggagcactagtgagctattgtatttgtggtcataatattagctgcataggtagttctataaatgtgtctggttaataatccacaaacgtcagtgttttacatttgtaagtaaagaagtctctgtccacagcaaaaacgttaccaggcaatattttttagcattaaaaatataaaataaaatcaagttacttcaaagttctaaagaactagaagtcaataaaattcataaatatttatttttcaataattctggatgtatcttaggatcctaatataggatgtacatcctaatatagttatgtttacctgtcatttattttaattgatatatgccagtacttctatagtaagattttattggtaaaatgttttttattcttcaaaatgcagattcctttcatagggtatattcatctaccattttccattctttgaaatctgaaataagtcctaaccttatacattcaccaggagtgtgtattaatcacttctcacactgctgataaagacatacctgagactgggtaatttataaagaaaaagaggtttaatgaactcacagttccacatggctgggaagacctcacaagcatggtggnaaagtgacaggcacatcttacatggcascaggcaagagagaatgagagcaaagcaaaagggaaaacaccttataaagccatcagatctagtgagacttattcactaccacgagtattgtgttgagggaaaccacccccatgattcaactgtcttccaccaggtccytcctacaacacatgggaattatgggagctacaattcaagatgagattcagatgggaacacagccaaaccatatcagagtgtatactttcattttattcctcaatcttcattccttaagttttcaacaaataatttgcttttgaaaggattaggagcttaagttggctttatagttatccagtaaccttttgatttctccaaccaatgatttgtaaaggaatcttcagattcagatttatcctttcctacttcatcttcaattgctaaattaagcatgagtcccatcactgagataacagtctttcttggacagagttatgccaggtctttttctatgtaaagcagtcatctattaggctgtcgttggtctgtcaagatgaaactgtgtgcattggatccatgtgaatgaacatagaacattatacaaatattgtatgtttctattctttgcttgaagcttctggttacttagatcttatagtgcttcatagtataaaaaatggttaaaatacttaaaagttttaaagataaagatgtcagtgtcacagtgcataactgggttttacatggtcaagtatacacacatacacacacacacacacacacacaatttaaaaaatctctgatgcactatgccatactcagcaccaatccccattacaactctcccaatgtttcctggccaggcaggtcaccaagatgtttgggactgtttatgcctttgcacctactcatcataatattgtgtggggatcaatgggagagatatttggcccatttttaagccatatcaggggatcttccacttcctaaactcacttagacttggaatttaagtctagactattttgtttttaaccttgctaacacctacctacctacctacctattcattgtccatagcctaggtagtcttgaaaaaccctccattcccgcagcttcccccaatgcctcctctgaactcagtgtcactcctgtgtgcctcctttagtgttttttttgtttgtttgtttttgtttgtttgtttgtttttgtcattgcactcaccaccttatattgtaaaagtctattactaaggaagtattcctccctcctttatgtgcagaattccttgacagaaaggataggtcatgtttacctctgtcttgcctccaatgcgcagcatgaagcctggctctatgatcagctctaaagaaatgcttgttgatgggcaaataaactcgagaatctcacaccagagccagaccggaagtttccttcatttcatgactggttttcacaaaaacaagcattagggagagtggaaggaagagcttgcaaaataccttactactgcattatgaatgtggagttgtaattttgaggttcttatccatgaagatggtccttaaaattcagaattttaattaccaacataacaccatcctttcttactagtatcattattttatactatgttttcagtaggacatatctgatggaaatacatttcttttgatattatttattataactggtgagctacattccacccaatagtaaatgcctctcagcaaaaagatagatacttttgatagttaatatattcagatattatgttgtttgtggaaaccataacttaataaattttaaaacagtgtcttctttaaaartaattttttattaaactttgtattttgaggtaattgtagattcacatgcagctataagaaataatgcaaacaatactttttacccagtttcctccaatggtgacatcttgaaaactatcgcacaatagcacaactttgatattgacactgatacaatcaagatacagaacattttcatccaggcatcccctgtgcttagcccttttgtagctacgtctacttcctttgcccaccctcaccttaaaaccctgscaataattaacattttgtcatttcaagcatgttatataaatggaaccatagagtatataactttcaggtattggttttttccaatcagcataattctttggagattctttacttagcatacttctctggagatttatctaggtgcttgtgtactagtagttcattctttgttatcgctgcatagtatttcatgctagggatgttgagccatttacccattgaaagatacttgggttgtttctagtttggggagattataaataaagctgctataaatactcatacacagatttttgtgtaaacatacattttcatttctctgagataaatgcctaggaatgagtgtgatttctagatctgatagtaattgcatgtttagtgtttttaagaaaccaacaaaatattttccaaaattagatgtgccattttatattcctaccagcaatgtgacagcaattgtttttctgtatcttcaccagcatttggtggtgttactttttttattttagccattatgatcagtgcatagtgatagctcattttggttttactttgcatttctttagtggctaatgatgttgaacatcttttcataggcttatttgcatctgtatatcttctttagtgaaatgcttctctgttcctgttgcctattttctaattagattgttttttgactgttgagttttaagagttctgtatatattcttgatagcagtcctttgtcggatatgtgatttacaaatattttctcccagtccatagcttgtcttttttattctctttactgtttttttccacaaggcaagagcttttaattttgataaaaataactttttatacttaattggcaaccaaatacctaaatgtcttttgatagaaaaacttgtcctagataatgtaaaatcattttacatattcacagatccatctccactaatgtcatataagtttaaaaatcacaaagtaatttgaacagattcctaaattataaatyagttaacagttattttttgctctaatctttagttgtacatttacttcaaataaacatttgttaaaaacgtactctgtactgaggaatgaggatacaaaactcataatttgtcatttctttgcttcagggacttacattttactggattacatctaaatttttatttggcagttttattccaggaagatcatgacagtcttgttttctaaatcttaactgccttttgatgaaaaagaaagataaggctttaatttctctagtgaaacctgaagaagtaaaataaaataacttgtatgtcccttcacaagccacagtcagaacactgtcacaatctcgacctttgctccccaaaccctattttgcaaaccagatgctatttctttggacattacaggctattttcaaaatacatcagaacttaacaaaacatcatattagctaaatagcactataagaaactgcttataatattaaaattatgtcttgagtttataattatataaaaattgaatctaccctagagcaaaaattacaattaactactaaaaaatcgaataagtgatttttttttttttttttgaggcagggtctcactctatggcccaggctggagtacagtggtgtgatcatggcttactgcagccttgatcttctgggctcaagcaatcctcatcctcccacctcaacccctccagtagctgggaccacaggtgcaccccaccacacctggtatattagtttattttcacattgctgtaaagaactacctgagcatgtgtaatttattaggaaagcaggttaaattgattcagagttcctcctggctggggaggcctcaggaaacttacaatcatggcggaagacaaacaggatgcaaaacacctcttacaaggtggcaggagagagagagagtgagaggggaactgtcacacacttttaaaccatcagatctcgagataactcactgtcatgataatagcaagggggaagtctgcccccatcattcaatcatctcccaccaggcacctcccctgacatgtggggactacaattctagatgaggtttggttgtggacacagagtcaaaccatagcacccggctaattttcttttcttttctttttggtagatatggagtgtcactatgttttgtttccctagctggtcttgaactcctgggctcaagtgatctgcccacctcggcctcccaaaatgctgggattacaggtgtgagccagtacacccagccaagaagtgatttgtataatggcaggattatgaatgattatttctgtgtctttaatttgatcatatttttaaaacagtcattatttttggtcatcatgctatatactacagagagcagtttttaatctgtgaacgtgtaagtcaacttgatttagctgaacatagcagagtcatcaatcaaactgattgatgactaagggtccgcagggtaacacatcatcatagttgtttccatggtgatgaattatgatgtcacaaactcatcaagactgtgactcagtgaaccatctagacagaggatgaaatgcagtagttcaccaacatgtatgccatctttgtattatatggtattattaattaaaacgaagggctgagtatttctttcattgagattacatgaagatattacgtatattcagacttgcctgaacacggctatgctggttttaaattgaaggttttcacaaagcaaaaaattgagaaacagaatttgacatagaattgtgtatttattagaaaagatcttttcttctcatattctgaaaagcacactcattaattacagttaaattcaggcaaatttggcaaattttcgtcagtatacttattcttttgttagttaatagctttgcttttcagttttagatattggtattaaatatataaagagaaaagaccttagtgttctcatgctcagagattaagagaatagttataggtttgaaattaggcactttccctgatagtttttgttggtacatgttttaggttatgtttctatgaacaaccagatgcaaacgtcctggcattcatcctgcctgcttgctgtttgtaccatctccgtggtagcaaccatccaagctgctggaagcacagactgagctctatgagtcaattattttatatacctgggaacgtgctagccttcctgtcactctttgatgtcactatgtagacagtttgcagcctaggcaacatggtaagaccctgtctccaaaacttccaaaaattagccaccaggtgtggtggtgcatgcctgtagtcctagctactctgaaggttgaggcaaaaggaaccctcaaccccaggagtttgaggctgcagtgagctatgatcgcaccactgcactccagtctgggagacatagtgagatgctgtctttaaaataataataataattttaaaaattaaaaaatatctagacaatttctctgctttcaagactcttcaaagatctcaaagagaagctttactctggagtctcaacagaggccattcaaaaactcaacctggtttttcaacaataaattagaaatgtaatgctaacagtaggtgccaaggccgaacatcagggaaaagacattagtgaccttgagttctagactagattttaccagtttctgaccttcaactctggtactcgattttctcataaatgtgagaaaatatcttaaccgtatcacagaattgatgtgagaattcaaaataaagcatatttaaagctcctaggttagtgcttcatttatgaaggtcagtgcttcataaatgatagttatttttttccattcaaaatagagataaaaaagactttatctcactaatgtgtcatgcaaataaggattaatcctgttttctattcctgaagcatacagaatgtgatttctttctccatcatttccatctgactatcatctgggagaacacacagctgctccacatctggtgcaacacaggcagatgtagctgtccagagggagaagagtgtttgcttttctccacctaaacactgaccctcttctgcttagattcaaagactgtcttccttctgcaggtttacctgagcctggactcaaagaattaccttcattatgagctaaaggaagtcaggcccattcttcttctgcctggcccctctggctctttggcacttcccacatcctcctcatttggaaaggcttcatgactttctggttcacaaagcagctctgttgttgcttatttccactacagggaaaaagtgaaacacttcactcagggcgcagaacaatggaagtccctggaaggaaaggcttgcaagagaaaaccaagtggcttctgagatattcgaaagtccagttgttttccctttttaaaaattttcagatgctctttgatgccatttcataaagcctgtgattgggccaaaagtcttagttcaccatgtaccacaaatagtgtactctatatagcatatgcttaactaagaaaaaataaagatttagaaatagatgtattgaggacatgccattaaaagcagcttccattgaatcaactgtttttcagagtactgtcaagattaccttaaactagtctaatcaaggtaggtggtggattccaaacttgggaaaaagtgagtctttgtattctgtgaagtttaataactacccaaggaagaagtgttggatacaacaactatgagtatcttagaaagtatgtcttttttttttttctgagtcagggtcttgctctatcacccaggctggagtgcagtgatgtgattataactcattgcattgcaatcttgaccccctgggctcaagccatccttccatcttagcctcccaagtagctaggactacaagtggatgccaccatgcccagctaatttttttcttaatttcatttttgtagagataggatttcccaggctggtatcaaactctcaaacttcctggtctcaagcagttctcccaccttggcttcccaaagtgctggcattataggcatgagccaccacacccagcctgggtgtctgtctttatgctaaatgtccgagcctttccatttgtcttttgcctcttcataaacctctgctgagctttatcaggtcattcacatctttcattacaggcaagtggtaaacttagtaatatgcttcctctggtgacaatgggcaaaggactagaagcataagtaaagaaatagtagactgaaataagcggattttgacatgcaaaaagatgcagcaaggtgaacctggttaagaaatagactcagagagcttgaacatggaaggatgctaggacaagtggcagctaaggcagaaagacagccatggttccagatgtctggggaaacaatggaaggcagatattacaaagttttccattttgtaccagaagtgtccgtatgaacacaaactcctagtaagtgttcttaattgttctgtgggctgatgtgcatttttctcctacaataggaactagcaatctacatattatttaccaagccttcctagatagaagcatttatgattattttttgtttatataaatgtcttgcatttactagaaaatcatgcttttcgagaacgcatttctattatggagtttcttaaagagagaaaaaaaaaatgtatggctttagaaaaatcctagtgattttttgacagtatgaactgtattgtgtgttcttgtcttggatcaatatcatggcacaatgctttgatagtgtctgaagattaagatatacaatacaatttcctcccttcccttctttcctttttccttccttcctttttcctttctttcttttccttccttccttcctttctttttctttctctctctctttctcttccctccctccctccctctctctttcctctttctttctgtctgtctgtctgtctgtctttttcttgagatagggtctcactttgtcacccaggcagaagggcagtggccctatcatatttcactgccacctcaaattcctgggctcaagggatcctcccgcctcagcctctcaagcagctgggactacaggtgtgcccctccatgtgcggttaattgtagttttttgtttggggtggttttgtttgtttgtttgtttttgtagagactttgttgcctaggctggtctcaaactcctgggctcaagcagtcctcccactgcaacctcccaaagtgctgggattataggtgtgagccaccatgtccagcccaataccattttcttatgtttcccatatatgcataattttacttgcatgcaattctgaatggatgaaacatgttttaatcacctatttttctactttgtagaagagccaaggtaacatgaactaaatcattaaagcagttgacttgttagtggattgtgataggactcaggcatttcccaaagggggaacccatattttggtaatcccagacattttaattatatttttctatccattcctcaatgccacaatgaggaacagcattctttcctgggaagtctcacaattttgtcaaaagtagaagagttgcctttgacgaatacaaatccagcaataaagaagaacaggtctaacaaatgaggccaccttggaaaatgtcattttgcccctttgagccttgcccatcttacctttagaggaagagatgggactgaatcagttcaaagagcctcgatagctttaaatgtctgtgattgatttttctgcagagcaagatcaaacaaaacagtatttcctagctgctgcccttacatgtagtggtgattcacagagaatttggggaggaaagtagccattatgggatgttttgcaaaaggcaataccaagattgatcatcacctgagggcgayacactatagttgttcctctgtatccatgacagattagtcccaggaccccttgcagataccaaaatccacagatgctcatgtcctgcttataaaatggcatagtatttgtacacagccttgtatatcctcctgaatactttaaatcatctctagattacttataatacctagagttgtataaatgctatagaaagtattgttatactgtatttttaaatgtacattagttttattttttttccgaatacctttttatccatggttggttgaatccacggatgcagaacccatggatatggagagctgactgtaatagtcaaagacaagagtggctggtggtaagcacactatctgtccacaagtgaatttcccctaagaatcctgctggtacatttcttcatttcttgagattattgaaccacgtgatttgcctcactgcttatttcaccttctgggtgacatgggctgtgaatgtgcagttcaaggcctaaatattagccctgattcaaaatggacattaaccaaaaaaacaaacaacaatgatactggccaactgacttctctcacttctctcttctcttttctttaattcattccttacctatttagaatagctgaggctcatttttatcttcttatgacagccagaattgtcatctattaagattaagtaaggaaggcataattgatattcacaaaccaccccaggatttatcagaagtgagggwgtttcatatggattactaattgtctaaaatttggctctaagcacctgaagatcactaggcaggagagaagagtagggtttgttgtacatgagaagaggctgtggggtgggggatgttcaccgagaagactgctttggtctttgatactagcatttttccttctatatggttaacaaggcacatattttcatttttatatccccagaataaaggcttgaaaggaaacaaaatctcaaataaatggactaatttgttaaattctggactaaacctcagtttattttaacagctttaacaackgtctctggagctcataacacatatagagcactattggtgtcacacaaaaccttgaaatcagaattgccacagaccgaatctgatctgaaatggcatttcattcaactgcagctttgtgtcacaagaacctgtctctgttttcctaacatgggtatgatgcatattcagaagcagccgagtgatttacttcttttttcattacgcttgtggatttgcatagattcagaaggggcatcttctgggaggtataagagtttatagaaagactaatttcttgactaggcacgatggctcatgcttgtaatctcagcactttgggaggccaaggtgggaagatcacttgagaccaggagtttgagaccagcctggccaatatggtgaaaccctgtctctacaaaaaatacaaaaattagctgggcgtggtggtacatgcctgtaatcccagctactcaggaagctaaggcacaataattgcttgaaccagagaagtggagattgcagtgagccaagattgtgcccctgcactccaacctgggcaacagagtgagactctgtctcaaaaacaaaaaaaaaaaaggaagattgatttcctgtagacagaaggagtgtttatattggcagcagcaatgcagtatcaaaactttggggtcaccctcttgaatatcttatttgtatttcttcttgggttactaaagtcttgaggagaaaaatgaataaaaggcttaagaggattctcatttccatgcaaagcttctccacactcctgagagaaggttagggtcaggaaggaaggtcagacaatataaacctcagcactattcagtaaaatagccatggggaaaaatatggtaagtttgtcttaattcatacccaaggacatttagcgctcagaaaactaaaatactttttatttatttatttatttatttatttatttatttatttattttgagacagagtcttgcactattgtgcgggctggagtgcagtggcgcagtctcagctcactgcaacctccacttgaacctccaggttcaagtgattctccttgcctcagcctcccacgtagctgggattacaggcgcccaccaccacacccggctaattttttttttgtatttttagtagagacggggtttcactatgttggccaggctggtcttgaactcctgacctcgtgatccacctgcatcggcctcccaaagtgctgggattataggcataagccaccttgcttggccctaaaatacttttaataagattgtctcatccttctcttggttttccaatggaaatggtggtatagcaagtccatctgaaacacttctgcaaaataacaatgaagctaatcacygtgggaaacatttacatcatatgtatttgcatacagaggaaattgataatcttgagacatcagcatactagaatagcaagagacatgttttattctattatattctcttagtcagcaatktttaattgttgcttaaaggaaactgaataaaacgtgggcgcagtggctcycacctctaatcccagcactttgggaagttgaggagagaggatcgcttcagcccaagagtttgagaccagcataggcaacatagtgagaccccatctctacaaaaaatattttttaaaattagtcgagcatggcggtggctccctgtagttccagctacatggagggctgaggtgggaggatcacttgaaccagggaggtcaaggctgcaccctggcctgggcaacaaagccaaaccctgtgtcaaaaaaaaaaaaaaaatacgtaaagcaacagtttttctataacggattgcatggtaaaaggaaggatgactttcttactataactccttatgataattttttccaaagtgttaatcttaggggttgaaatttttataggtaatcattaactttagtagaacattattttaaagtttaggtatttcatctgagtatattactctggctttcctaagctagcttagttatatatgttcacttcagtttgagtctccactaaattttaacatgaacaaaatattatatgcaacaccatagaagcaattgttaaatcattgttacttttaatatcacctaaatctaacctaagtaaatgygtttatttttattaccaactgatgtagatatacccacatggacagaaaacagcataaaccaccaaaaggacttgaaaattccctcttcaagacttcttttgccaatgactaatgtttaatgctatttgctagagattctggtgccaggaggatttctaaccaggttattttatcaataggaataaaatatcgagggcttaaattagtgtaatctctcaagatcttgaatttgacrttttcataatttttacttaatcatagctcctggggattggaattactcttttagctggcccgagtctgggaggaggatccaaagtctttgagttgttttcttttatttctttttagcccctaaagcactggaaatggttggccctgaagtgctcctaaggtaaccgcaagatgaggcaaaacaggattgagatgaaaaccaagctcacccacatcctacgtcaattagctatttttttttctgtgtaaacaatgggagggaggtggattgtagcttttatggtagaggttcctcggcacctcctgacgcccccaggggtcccccctgccactgccctcagcccaaatataagctgacaacaaaatgtttcttcaaagtgctcattgtttactctattctggcttcttcttaaaggtcatcatcatgttgaattatcttgagaaaatcctctgaagtgtatgtgtgtgtgtgtgtttaggaaggatgtgaggaggattgggaggtgagtctctgaataacaagttgaaaaaagagtatggaggaaagcggtgtttaaaattgtccaaagccatcggccgggcatgatggctcacgcctctaatcccaacgatttgagaggctgaggtgggaaaattgcttgagcccaggagtttgagaccagtctgggcaacatggtgaaaccccatctctacaaaaaaagtacaacaattagctgggcatggtggtgcatgcctgcagtcccagatactcaggaggctgagatgggaggatcacttgagcctaggagtttagggctgcaatgagatgtgagtgcaccaccatactctagcctgggcaacagagcaagaccttgtctcaaataataataataatatataaataaacaaataaataaaattatcctaagtgaaatcagttgttgatagaactgaagtacatcaagcctagtgggactgtggttgtctctccagcctaaaaaaaaaaaagaacaaaaacaacaacaaaaaaacttaactccaaaattgctgytgctccatttatttcaggtgtaagacttctttgagatttaaaaacaatataatcatttacaatgtactttgttggacctaagcataggaaaattcattcattcattcattcattgagtacctgttatatgccaggcaatgcactaggcaccatcaaagatgaataagctatgtgctaaaattcacagtctaacagaagaaacatgaaagcagagtggaaatatactgtggcaatacatatttggatatactggtattaaaaagtaaggatgtttcagctaaatcttttttggtgtttattttttaaaaattcatctattaacttcctacacaccatgcatatattcagctaaatcttaaagtatgagaagaaacatgccattcatgaaagggaagagggagccagtgcatcagatacaacctatgcaatcgtgaagatttatggcagagcacaggatatttggggattggcaggcatttcaaaatggctggcacataaagttccgggatgggaacaggctggcaagagaagagatcatcggagccaaagtaactgaactgtgattgaattttagatatgataatatctataggaaacctggcaacccggtgggcaggtaaatatgatagagcgaagatagaatcttcaggccttcaggggactaagcaggaatagaataattttattgagcactttaagtggacattatgctagattattttacatatttcatctcctttaatttacaccacaaccctgtgagtgcaggttgataaagaattaaataaaatccaggtgaagtagcagcacctatagttccagctacttgggaggctgaggtgagaccattacttgaggccaagagttccaggctgtagttcacaatggttgtgtctgtgaatagccactgcactcctgcctgggtgacacagtgagacctcatttctaaaaaagaaaaaaaaaattgagacagggtctcgctctgccacccaggctggagtacagtcacgcaattacagcttactgcagccttaacccccaggctcaaacaatcctcccacctcagcctcccaaatagcttggactacaggtacatgtcaccacacctggctattttttgtattttttgtagagatggagtttcaccatgttgcccaggctggtcttgaactcctaggctcaaatgatcctcctgcttccaccttccaaagcgctgagattatagacgtgaaccactgcacctggtctagaaattatttaataataaaaaaatgaagacagaattcaatgaagagcrtagaagagtctcttaaacctytgttttaagctatgagccaggaaagagatggtggcaagggtgagatggttgcagtgcttttttgttcacttatctcaggcctgtgtgttctgagttaaagacaagtcagttggcaagagaaggagagaggaagcttcccagaaccatttgaaggaaaatttggaaagtcttctctaagggagttgccctcaactaccttttaacacaaatggaggactgaaaaacaaaacaaaacaaaacaaacaggaaggaattgcagatatacagatctttggcctttcaaactatggtatctcttagtactattttatatattgataataattataatttttctcaaacttcccaaaagtggaacattgtgggaaataatatgggagtggacatttgaatttctgtttgactttgcagcagaaatctcttttctaactctctctttcaatctcaccatcagagccatctgattgcttgataacatgattctttttgcccagcccttgttatcctccctcctgccctagtmaccatgacataggctccactcatttctacctaggaacctggatgcactgctttgcactattgcctcctggcaaaacagggcaatgagaaaggaaatggaagcccaaattcagagccctccttcccagcacaagaatgaggagatgccctttttccccggggagggggattcttccctctctcttcagtaattgtctttatcactgtcatgttctagccagtctttattatccccgccacacaaatttcatgttcttctggcagtcaaatcaggaaattcaaggacacaactgctctggcttcgtaaagatggggatcaaattgtttgagttgctgatagcaactctttgcttcttgattctccatgcctcctcaagcttttttggctgaacttttagccttggaacagggtcactggaaaatacttcttaatatccttaaattctaattctaatatttgccttgtttcattttgtttatttggggaggataaagtttaggtgttcacctatcaaactcacttccttcttttttttagacaaggtcttgctctgtcgcccaggctacagtgcagtggtatgatgttggctcactgcagcctccacctcccaggttcaagtgattctcccacctcagcctcccatgtagcagggatcacaggctcgtgctaccacgccccactacttttttgtattttttggtagagacggagtttcatcatgttggccaggctgatcttgaactcctgacctcaagtgatctgcctgcctcgacctcccaaagtgctgggattgcaggtgtgagccaccgtgcccagccctaacttccttctgatcaagtcattctcaaaaataaacatttaattgactgtcaactacaatgataataagacaatgtttgccttaaatgagctctaaatctagttgaagggataacacatggaatggactggtaataaaaagtgggctttgcttggtgctacagttgtgatgtgaactaaagagggagtgttttggactgactttgagttggggaggctttatggaggaggtgacttttcagttgggccttacgttgtattttatgaaataaaaaaagaggaaagacagtccaagatgagaagacagtataaataaagggacagaggcatggaagggaatttcttggccaaaggatagtaaaaagtacagaaccactaaagtctagagcacataggctagaggctagaataagtgagaaatagctaatcctaggaagataaattggggcttaattgtaaaaacctttgcatgctatactaagaagctttgagttcattctcttggcaactatgagccattacatgtttcaaaagatagatctgatggaaaaacagaagtatagagggtaggtaatattctaatgtgtaaacttctactgtgagtccaaaagaatatggtatctatctctgaaccatgttcaatattttgcttagactgttcgaactatgtaagaataagaaatactaaagtgttttttctctgatataatatttaaataccttttagctatcaattccttctaatttccctttaataagacatttactacaaatagacatcattcccatagcaatcttttcttgagacaaagaggtcagtaggccaggttctgcatagaatataagctatttttccattttagaatgccactctccattgatgtctactctcgttaagtagaaaattccaagaagtactaacaaaattatgttaatttgtgtatgtactgacttccagacatttggaaccagattctgaacctgtaactcatttaaatcttgccgtgactttggtttcccaagttctaggtctttctctgaaaatttaaaatgcttctggaaagatattttccatgacacttttgccttaggaaaaaaatttttggtcaacattggaagaaaaaaaaactgagacaacatatatcttgctccttaacatattctgtatgaaattaaggtcttattgacaatctacgtatcagagcctcgtacacaggagctattgaaatgatgtgtcagttcagaaaatcatgttcattatttctgattctcatcataaacaagcagtaaatcaccgtataaggggtgtatgcattagggcctcccacataaacttcacctctgcgtgtgtaaacattttcttattatcgcaaataatcaacaggagaagagcaaatgcaagtttagcttttctccagaatgtttatcatggttactttaaactgtttataggaaagagtgaactataaatgtctttcaggaggtgggtaggaccatatggctcagaggcttttctgcagtaaaatgtttggttaaattttaggcaacagacagtccttccacagcaattatttgtgatttcgagcatcgttgttgatactcaactcctgaaacaaataacaccgacctaaaacatttataataactgaagaaaccaggttccttttaaccctgctaggatccagctgcccccttgcaacccatccccagtcagctgcagctcaggcaagcccagcctttccatccctgcacatcagactgtggtgcagagaaactccctgtgttcttcaaaacaaacattggatgtaatccacctcaatcttttccatggtgaggctttacaaattttagttttctctaagaagatagcctgtatattcaattgcctgggtaaaagtttaatttctgatgcgtaaagcatatcctgccttgaaaaatatctcaggaaaaataaaggccacaacagtttcatgtgtgcctatatcaggattgctgctgagtaagttgtgaaatgtttttggatttctgagccatttggatttcagaattgtggaggaattctggatctgtattttattgtgtattaccaattattttcctttctcttttatgtgacgggtagtattttgattatttaaaatcatctttgtagaaaaattattggcagctatgaatttcatttcaagatatttaagatgccttagaaacttttctaaaaacagtataataggattgagaaccactcatgtatggcctttactgtttcgaggtttttcttttttgacatgtattatttgatgaaaccctatgagattaggtctttacttccgaaagaagaaaaccaaattcaagggcaattaaaaacttgtcaaatgtctcaattttagtaagaaaaaaaaccgacattggcctagatcttaatctgtgcccagtcctcttcccatccctctttttttttttttttttttttttttggkgggctgctctcaaatttttgggctcaaatgaacctcctaccttggcctcccaacgtgctgagattacaggcatgagccaccgtgcctggccagctaaggttaatttagtattgaaraaatatttttgttatgaatttagtgtagccaagtgtgcagtgtttaraccatctacagtaatgcacattaatggcctaggccttcacattcactcaccactcactcactgactcacccagagcaatgtctagtcctgcaagctccattcatgggaaaggcctcacacatgtataacatttttttgtcttttattctgtatttttctatgtttagataagtttagatgtataaatacttatccttgtattacggttctctagtgctcagtacagtgacttgctgtacaggtttgtagcctaggaacgataggttataccatatagccaaggtgtgtagtaagctgtaccatcttggttcgtgtaaggacattcagtgatgaaattgcctactgacacatttctcagaaggtacccccatcgttaagcaaccattactgtattagaaagcagaaaaacaaattcagctccggacttagcctacccatatagcatcattggccagaagaaaatcactttgctttatgaatcccagttttctgcgggaatgaaatgaggtaccatacgtgatcctaccagcataacacctgccaaatagtgcacattcaatactaaaccatcctttttatgcctataaataaaggatttgtactatatcaagagcttctctatgtctgaagttacaatagagtaattccaaattatctttcatggaatcaaatccctgatgatcccttgattttctgagttctgtgaatttcatcacagcccaatttgacccattactgctaattcagtgtttttattagtaaattatatttccaagttgaatcaaaacaacagtatagcaggcacagcttaagacacaagataaataagttgttgcattcaccagtcaaaatatttttaaaaaatcaagaagcaatcactgaatagttttccttgatttagataccaattaggtttaatgaccaaatgagactgataatcagagctgaggaactcaatcaacaggattgcaacatgctttttttaaacctcttgaaagatcacatcactacagaataaggaaacctatttatttatttaatttgagacagtctctctctgtcacccaagctggagtgcagtggaatgatctcagctcactgcggcctccaccccagttcaagcaatttcatgctcagcctctgaatgtaagctgggactacaggggcacaccaccacgcccagctaatttttttgtatttttagcagagacaggttttcaccatggtggccacgatggtctggaactcttgacttcaagtgatctacccacttggtctcctgagggaaatctatttatgactaatgctgttctttttactaattgtttcattggctgtcagcccttagaggaaaaactgttcaaacaaccttttattcatagacccatgttatttaattttagaattatttcccatgtatgcacaaccgaattttcattttcataacaagaaaacaaattctttaagtgagaaacagtacattttacacccttccttttcacaaaaatctcacagtattttctgacttatggtcttgataattagcactcctgtttgctcgtgttctctttctttcacaagcaatgtgatcttatttttaaaaaggacctgagacaagtagacaattgacccttgaacaacacagatttgaaaagttttggtccacctatacacggattttctcccacctctgccacccatgagagagcaagaccaagccctcctccataccctactccatctgaagatgaccagggtaaagacctttatggggattcacttccacttaattattagtaaatatcttttctcttccttatgattttctcaataagtttcctttatctagcttactttactgtaagaatacggtatagactacatataacacacaaactatgcattatcaactatttatgctgctggtaaggcttctagtcaacagtaggttattaatagctaaattctgggggagtcaaaaggtatatgcagattttcacgggtggttggacccccccagcatccatgttgttcaagggtcaactgtatatcctaattgttatttgacactggaagaaattagatctcctggccgggcgtagactcacgtctatcatcccagcactttgggaggccgaggagggtggatcacctgagatcatgagttcgagaccagcctggccaacatggtgaaaccccaactctactaaaaatacaaaaattagctgggcgtggtggtgggtgcctgtagtcccagctactcaagaggttgaggcaggagaatcacttgaaccctggaggcagagattgcagtgagatgagattgtgccattgcactccagcctaagtgacggagtgagactttctcaaaaaaataaataaataaataaataaattatatctcctcttagaagtttgtccctctcttcaactgaaatctatcacagttcgacctacatggtagttgcattgatctgtccatcctggtgccacatatagaacatctactttgtcagatactgttccacatacagtaagcagaacacatgatcccagtccacatgaaggatggtgtccagtcatgtatggcctgattcttttctgtaaagtgctttcacatttgtagttggttcctttcctagagcactcctgtttttgcattcttgtagaaagcaaattatttccaccctgtcactgatttttttctccaattcaaacaatacgaactagaaaagagaactcccttgtaatataaaaggaaatagaaatccctatgtattcaatgtttttaaagtttaatatgattcctcttagcaataaccagcaaaaagaaaatgtttctactttaatcttttcttttgaactgaagtgttcctctatgtcatttacatgacaattggcccaaatctctctgttaccaggacttggtattcaaagtaagaggcttcattaaatttcaagaggacttttttggggaaagtttttgtttgttttgttgtgttttatcataacaaaacaaggcatagtgaccaggaagatggagtttctagttagtgcatacatatacatgcttatggttacttaatgtgatagaagcaaattattcagatgcctcttctccacagaaggttttggtcttcagcacgtaaagcaacttttttttttttgtttttttgagatagagtctcactctgtcaccaggctggagtgcaatggtgcgatctcggctccctgcaaactctgcatccggaattcaagcgattctcctgtctcagcctcctaaatagctgggactacaggcacgcaccaccacgtccagctaatttttgtatttttagtagagacggggtttcactatgttggccaggatggtctcgatctcttgacttcgtgatcctcccgcctyggcctcccaaagtgttgggattacaggcatgagccactgtgcccggcctcatgtagagcactttaaaagtacattggatccatagtaatcacttaactatgaacttgtatatccatatcaaaacttcatgttgtacagcttaaatatagacaataagaataaaataaataaatgaaaatattttaatatgctgagccatgttctggccatttttctctggccttatgtagctttagcttttcattctcaaagcatggatcaaagagctataagaagaaattaaccagagactttatcctgattgtttcacatttccaaaggcaataaatcagtcatgggctgagagaagagaactgaagtctaccacaacaaatatatttctgccattttttcttttatttcctataggttttgctttatgaattttgacatgatattttcatcatgtgtagatatcatacctctttatgcttttattgcaggtgaagtcatttcctaacatcactgctccctctcccttctcccagcagttatctatgtgaaacaaataaatgttatttgtgaggttcagctaattcagataattagcattaccaagaggcttacaattattctggaatttgtgtttgcttatttgtttccccaaatacagctaaaggagaggagaggatcaccagatcttatagtaggcaaaactatgaattattagtaaatcttcctcctggctttctatctcactggctgctcattctcattgtccttcactctttctcctctgtttaacttccaaatgccaagcatccctgggagtattctcttcatttattacattcactcaaatggttttaaataccatacatatactgatgacacctaacactctagttctcgtctgtgtctccctgaactccagactcgtaggtccaactgacttctgcatatggctgtccagtcggcatctccaattgaacatcgtcagaacaaaacttcaggcttttccccaaccagctcttctggtcttgcccatctcaataaacaccactgctatctrcccaattaattgagccggctatctggtagttattcccttctttgcctcactgtcttctgatccccatatcctataaactctaataccaagtatccctggaatcctttcagtttttcctatctttacttcttctccttagtctaagctattatactctcttgcatagtttagcggtagtttttaagccctttttttatttttattttacgtttgccttttctaacaaattctccttaaaacagccagaatgatctctttgatgtatgatttagccaagtgtggtggctcccactagtaatcccagctactccaggaggctgaggtgggaggattgctgggagttcaagaccagtctgggcaacatagtgagaccccatttctaattaaaaaaaaaaaaaaagaagaaggaaacatgaattagattttgttgctcccttgtttaaactctctattggctttttacttcatttagaataaaatgaaactccctgtcctggcccctatttgatcttatttcctgtcactttcccattgtctgttatacctcacaatcactggactgcagttattgctgttcctccgaactacaggccttagggcctttgcaattgctattttctatggctggaacactttctcctcagatctgcaaaagattggtatcttgtttagtcagatctcaaattaaataccacactctcatagaggccttctctcacctcaggctggtgttggtagcagtcattgaacttcacaacaccttatgttaatgttgtgcagaacacttaccactgcctgatattttactgataggtcttttgtctgtttcctgccactcctgcccctgaaatagaaagcaagctccatcagagaagaactttatctgtttgttcacggcagtaattccaggccttggaagagggtttggcacacagatgttacttaataaacataagagtgaatgaatgaaaattgttagaagacaccatctaaagtgagtcagacaatatgtccagcttcttgtgtgtgctaattaatgacactttgtggactatatatctgtatataactacttcatttcttacagagccttgatagatgaaagtaactagacatttaacttaaaaggtgctaggtcatcttcagttccaggctgtaagcattaagattgactgtacacgacctgttaaaaccattttctgggaaaggctcttaagtacctgtcagagtttacaatttgagagcaaacataaataaacccaaacgcctttcaactttgaacatttgatgcttgaaaatcacctctatttaaatttttgctagtcacatcttctcatcttttggtttcaggacctgattcatcagtttctatagatccatttataaactcagtcagcattttactttgccagcctatgagcacaagtaggcaactggaggcttggaaaaaacccagacaacaacaatttgtttttcactggttctgctttcaaacaacttccaagagcacaatacagcaaaaagtgagagttatctatttctcccttcttcatccgaatacaaaatacatcctattttactgctttttttttgtcttttgcctctactttaagacttatctaagaaataaagaaaagccaaccactcgttctatccacagaagaaaaacacacaccagcatagacaacacaaaagactrtgtctagatgttaagactatatatcctataggactataattttcatagatctaaaaagtgagaaacatatatatgtataaaattatgtgggatgcaagttactgagattttgaatatggggctctgtcatttaccctaaaatgttcagtggtcttttctattttttctctattctcagtaaaatagaactttctcaacaattctggctcctactcttccaatgggctcagcttgtctcatgatttaatagtactaaaaaccttttcttaaaaagaaaaaaaatcctttttaaaaaagtttaggtataaataagaaatttctatattatgaaagactggtttgcaaagaaactttaatatcttctggatctcatctcaatcacagtctatgaaggaaataaaataagtgccttctaaaacggcctattatactactatagctgttgtctataaggaaaaagtttgttagtgagttgtattcaatagaaaacctcaaagatggctgggcgcggtggctcatgcctgtaatcccagcactttgggaggccgaggtgagtggatcacttgaagccaggagttcgagaccagctttgccaacatggagaaaccccatctctactaaaaatacaaaattagctgggtgtggtggcgggcgcctgtaatcccagctatttgggaggtgggagaattgcttgaacctaggaggcggaggttgaaatgactctagatcatgccgttgcactccagcctgggcgacaaaagcgagactctgtctccaaaaaaaagaaaagaaatcctcagagaagatatcctagaactatttagttttcccttaatcgagtctgaaaacctcctgtgcccttccaccacttaataatctaaccaactattgtaaaattacctattcttctaaaccaccaaatagttcgaatagaatagccttagatatctaataactaaatgaaaccacagtttacctctctaggcttcagtttcttcttcataaaataagaagcttgaactcgaaaagttttagatgcgaagttcccaaaaatctagtagaggaagcaaaactctgtttggcaccctgtttccttgccctggacttttagcatttctttcttctggtgtaaagtcaaacaaaaaatagagatgaatctctaaatttacctttttattggggagataagagttgcaatacagggcatacacacagacctgatagtcttctgtatgtcagaagaacaaagagaaggttggaggttttacgaaaaggagaaatgtcttgtcctgaaagaaatttcactggcactagtaaagttgtggggagtggcaacctctgattggtgagtgacaacagtgcagtaggtaaaactaatcttagactcacagtggttgtcttagctgctattagataaaagtgatttcaggttacagcaggcagtttcagcagctaggtttgcagagaattacattcctagaacatgatattttaatatacatatccattgtgaaataaatactataggcaagcaatttaacatatttatcactttccatagttaacatttttgtaagagcacataaaatctacttattctgcagattttgaatatacaatacaatattatttactataatctttctgttgtacattagatctctagacacactgattctttttttttttttttttttttttttgagacggagtttcagtcttgtcactcaggctggagttcagtggcgcaatctcggctcactgcaacttctgcctcctgggttcagatgattctcctgcctcagcctgccgagtagctgggattacaggcatgcaccaccatgcccggctaacttttatattttgggtagagacagggtttcaccatgttggccaggctggtctcaaactcctggcctcaggtgatccgcctgccttggcctcccaaagttctgggattacaggagtgagccaccatgcctggcctagacatacagattctacatgattacaagtttgttccctctcatctactttccattttctcctctccctgcccctggtaaccaccattctactctctgtttctatgtatttgatttttttttttttttaagattctacatgtaagtaagatcgtgcagtagttttgtttctatgtctggcttatagttcacttagcaggttcattcatgttgttgcaaatgctagaatctcctttttaggttggataattattccattgtgtatctataccacaatttatttaccgcttcatctgttaatggattcttaggttgttttcatatcttggctattgtgaataatgctgcaatgaacgtcaaagtgcagatatgtccatgaggtgtttatttcatctcttttgggcatacccagaagagggattgctggatcatatggtagcagaatgttttatttggaagggaaacttttatactgttttccataatggctataacaatttgcattccctctgaaagtggacaagggttccctttattctacactctcaccaacacttgttatctcttgacttttttatacgagtcagtgtaactttaaatccacctggcctgatgctaaattatgaatgggaaaaattatattaatacttagaatcctgactgggtgcagtggcttatgcctggaaccatagcactttgggaggctgagatgggaggatcacttgagccaggagttcgagaccagccagggcaacatagtgagacctcatctctctaaaaaataaaatattagcctagtttggtggcacatgcctgtagtcccagctactcaggaggctgaggtgtaaggatcacttgagcccaggaggtcaaggctacggtaagccatgattgcactactgtactctagcctgggtaacaaagcaaagcaagaccatcttcacacacacacacgaaaaaaacttagaattccttttttttttttttttttttttttttttttttttttttgtggtagggtctcattctgttgccaggctggagtgcagtggcgatcttggctcactgcaacctctgactcccaggttcaagtgattctcctgcctcagcctcccgagtagctgggattacaggtgcctgccaccatgaccagctaattttttttgtatttttagtagagacggagtttcaccgtgttggccaggatggtctcgatctcctgacctcgtgatcctcccgcctcggtcccccagagtgctgggattacaggcgtgagccatcacgcctggctaaacttagaattctttacattcaaataatgtctggtatttttttacattattttcatgtatattccctaatttaaacttatccccacccccccccaccccaccatgatgtcgtcaacacagaactgttttctagattaggaaactgaggatagggattttaagtatctcgctcctagatcaggaccgcatccaggttgcagaatcccaatccagcactcttccacatagtcacagcactaccccaactctaatctactgatgacacagaacaaaattaaagtccttgtccaaatcccagagttcatgaacacagagatgttaatgctcctgtagttcatactgcaaaaagaatgtgagagcttgtttcatttttcacttagaaaatgtatgagatgttctttctgaaggggttctgtcactaacaggttgcattacttgtacaaccattatatctgaatcttcccagaccgtggtttttttttgtttgtttgttttgttttttattaaatactgtcattaaaccagaactcatggatatctatgtcatttccagctataaaattctagaaacttggggattttacctttttgtttcttattttattttcttttttatcaaaagccttatcacaggtaaaatggtaatctaagcaagaataagctctgtcatgatttatgaagcatggaaattcagctgtggccaggcacagtggctcacatctgtaatcccggcactttgggaggccgaggtgggtggatcacttgaggccaggagttcgagaccagcctggcccacatggtgaaaacccgtctctactaaaaatacaaaaattagctgggtttggtggtgtgtgcctgtagtcccagctacccaggaggctgaagcaagagaatcgcttgaatctgggaggcggaggttgcagtctttagcatgggtgacagagtgagattctgtcttagaaacaacaacaacaacaacaaaaaccaacaacaagcacaaaccaataatagaaactttaaatgattctgagccttgagaggaatgtgattatgcaacctgggaaattcacctgcccatgaatagtatctctgtaattaataacaaagtcttacaggacagtccttgccatcaccatatcataaacgtatattgcttcttttagttcataggaacagggtctcctgctgtgtcatagctgtaggatttagcctaaatgctcagtgagtttgatgctcccttgagcaagcccgcttatttaagaaagtagtttttggatattcatggtttattgctgacagttaacgttctcaaaatagtgagagtcctaaagtcaaaggggaatttattaacaattttatttctgagaggatatgacaacaacaaagacattaataaaaaacaccagcgagctttctggcaatatgtattaaaattttcaaaaacacttatactctcgaatccagcagttattatttcgggaaattgctctaagaatattatctttttatacaaagcattttctgaagagaaktattcaggaaattttcatttatgaacagaaaaagtccaacattatggaaatagtgatataaaatacagcatatatagttctttggtattttacagtcatgtaatcatggagagaaatacttcagataaattaacataataaaccacaatacaaaaaagtatatttacaatagaaaaaaagtttaaaagtgtgttagcaatacaaataaacaaatacaagaaggatctatcacaacaatgctacagtgatgagccttcagataattttcattatttttcttgatacttctatatgttcaaaactttcattaatgagcctgtaataccagcactttgggaggccgagatgggctgatcgcttgagctcagtagttcaagaccaagctaggcaacatggcgagactccatctttacaaataatacatacatacataagtaactaagtaagtaaattagccaggcatagtggtatgttcctgtacttccagctacttggagggctaaggcaggaggattgcttgagcccaggaggtcaaggctgcagtgagccatgtttatacccctgcaatccagcttgagtgacagagtgagaccctatttcaaaaaacaaaatttcactgatgacaataaatattaccttgacatcaaaaaaaaaaaaaaaatccagtgcctggatgatcacccagtagcatctaaaagtgcatttgaatatatatccaggttctgatgccagcattgatgcttgttatgtgacaaaaagaaatcacctaactgctttgggcttccatttcttcaaagtaaaatgaagtggttaaacaggattactccccagatgtctccccaaactttacactggtgtaataattgtttgcaaggatcattgggtgattatgtctaaaagcctgcagttattagtcctcatatcaggaatgtgctatccccattcattttattgtagaacctggtttgctgtgggatagttgaaatwtgaagaattcacttggtcagtgtgtttcacggccttgctactttttctgcttggatggactcacttctctatatgattttctctttaaatcagaagtatttgacctgaagcagtaactcctctattcatataatagtgatattctgatacatatgtgaatattataaaaataagtagaatgataatattattactaatattattgtggcagtaataatattatcattcacatgtgatcaatagtaaaagcacacacagcaacccctcaggatttcatcctcaggccattgactcccatcacctttactgatatttagcttagctttacaatcctcccctttgaaaaattcatattttaaccttgcctcccataaagacacacattttttcagatatagaatttgcaaggctgagacatatctttttagaatgaacccaatataaacacaaagcaacataggagaaaagtactagttacatgcccatggcaagaaaatatgcctgaaatggttctgtttattttgttgttgttgtttctgcttggaatttcagcagttatttggcaaagtgattagctagctgggaaggaagaaagctcgtctccatcagccttttgtcagagcccgccttttggtcccrgagcccccatgaaagtgtgctgtagaccaggaccactgttgccctgaatgcatgagtatgcagcctttttatcgtaggcttgtcatctcctgagttctgcaatagatgccatgtgaaatccagtatatactcagtctaacacatagctgctgcataagaaaatttctttccatgcttaagcaatttctgcatagagcttaattcatagaaatcacttattcattcaaaaagcattcactgagttcctagtaggggccacatattacgctaaagtagatacaaggataaaccaaatgtagatctgtcctttaaagagtataacatgtagggaacaactacactctacatggcaatagaaagtcacaagtgggtgagaaccacaggagagaaacagtcagagggtgatgacagccagaactggtatgatgtgaaaggtcaatgacatcagaaacggcctcagggattttatagcctggctccttcaatttcagttcttggtataggccagcttttcaggactgttgattgtccctcttctttgtgtgaaattcctagtgsacagagcttctgcagtgcctcttaggtactttgaaaatcccaacgataaacatctggacccaacacagaagcctccaggaagctgtcttgttggcagtcacctacgagcaggcgataaacacaacacattaaatagtatgtaatgctccagggattgcagtcctctgcctcctaatctctctgtcctttcctcttttattgacytgtcaggagcatgacasttgtgcacaaccattagcacacaagaaatgactttcctgtgggggtgatggggactggggaacctactctttgagatagaaagttaccctgatgcagaataattacagtccagcttagcctccttataagcgattaatcttacttttcctcttagcttctgtctgtttgtaacctgaggttgaccgaagttagttcttttagttggttcttgagaaaaccctttcagtctgtatttccaggaataaatcttaactctaatttaaaaaacaaaarggccctataaatagttacttcaaaccctttaatttatagctgcattctcaatgtcttcatcctcccaaaatcactcacctctacatttttgccctaagtacctaggttagcacaacttttcacaacttctctttaacatttctctgaataacgtgaaccttccttatttccttaaaatataaacttatatatgttcttcctaggagattttcaacttttctgttctccacttattactctattcactctgttctctatctgagctgtcactaattagtatctacttaaataaatatttgagcaatttaacattacagtttttttttttttttttcagcaagaagtgtgttcattatccattaaaagcctgggagagggactactaatgttacaccatcaatatctatttttagccacttcggttttggaagtgtctcttcttttggaagtgggagaccaagtggaggggaagaacatgaacaagggattgaagccattgagaaagtcatttattcattcgatagatatcttctgagcactgcgctaggacctaaggacagaataatgaaggcagagtttatccttccactagcacagcagtcaaaaccaataggaattaagattrtcagaagtgacaaaactgtacatagacctgttcacataactaacaagggaaacgatggaggtgatrtggaagtctgaacgtggtgcaggaataactcagccaacatccccctcctttgggaaatttagatagatgtaggtagattgagaagtgatataacagtcatgtggcatcattgagagagtcagttttctataatgacaaagacatggaaagagagatgtttagtacatgtacagcagaaggagttgattcacaacgcaatggaaacagaagtcaagaagacagtgaagtggatgaagcaaggagaaatcataaaaacaagcacactgggactgtcggacctcaggggagagtgacgtggatggtaaaccaagtttggggccagagaaaagtgaaagcttgtgctgttcttgttggtagtcatgggcaggctgtagcagggttattattaaaactctgatcccccaagtccaactgaaggggctccagtcactaccccatcatctcagtggtgagatgtagtcaaggcatctaacctctctgcctcagtttcctcatatgtaaaatagagacaatcattataaagtgtttagcagaatgccagatccacagtaaatatcagtaaaaggaaatttrtaaatttgtaaattgttagggaatggggtgagaccctcaagattctaatcttcaagggaaagaggatgctaaggaaagtcagaggaagcccgagaatcctaagagaggatgatacaagcaaattaattaaggaataagatcaaagaatattgggaaatgtttaatccacttggtgtgggaaaaggacttttwtgtttgtttgtttttgagacggagtcttgctctgtcgcccaggctggactgcagtggtgcgttctcggctcactgcaagctccgtctccctggttcaagcgattctcctgcctcagcctcccgagtagctgggattacaggcgccagccacaacgcccacgcccagctaattttttttttttttttttttgtagtagagacggggtttcaccatgttggccagattggtcttgatctcctgacttcatgtgatccgcccgcctcggcctcccgaagtgctgggattacaggcgtgagccactgagcccggccgaaaaggactcttttttttttttttttacacagagtctcgctctgttgcccaggctggagtgcagtggcgccatctcggctcactgcaagctccgcctcccgggttcacgccattctcctgcctcagcctccagagtagctsggactacaggcgcccgccaccacacccggctaatttatttatttttttctttttttcttttttgtatttttartagagacggggtttcaccgtgttagccaggatggtctccgtctcctgacctcatgatccgcctccctcagccttccaaagtactgggattacaggcgtgagccaccgcgcccgaccatgaaaaggactctttttaacctcttctccatgtctaatctgagtttcaacctttttattcttattctgttataagtacttctcccattcaagagcatataaaactagaattactttgggatgagtgtgagtgggggagagagaaggttgggagatcactagttgtgtttgctggtactgaatcctaccctaatacttccgaaatgaacctcattggataactcaactcttcattatgtttttgctaatcttttaggagcctttttgcaacccaccgtctccctaccctcgttgggtctttttttttttcttcttcagtcagggttttgctctgtaacccagtggggaaagtggcatgatgatrgctcactgcagccycaaattcctggactcaagctattttcccgccttaccttcctgagcagctgggactataggcgcatgccatcatgcgtggctaatttctaaaaaatatatatttttgtagagacatctctctatgttgcatttctggtcttgaactcctaggcgcaagcaatcctcccacctcagcctcccagagtgctggggattgcaggctgtttaatagaagttatcaacatatggagtcatttatgtctattgaaatatgaacagccaattcccttcacttgtcccatttctaattcagacactaattctgtttcagtttaacttggatcaatggacttatctttgcttctgttcagttatctgtttcaacaacaataagattctttatctatatggcatagtgggtgaaaggacacactaaccttacctactgctccttttatgtcagaaaatccattttctaatcactttttcttggacccaagtgagtctgttttttcccctacattttgtaatttgtcacatttacattttaggtgggttgttctaatcgacttttcttataaaagggtagtggttctagatcaatcgccatcaatcatgctaccaagcaatggtgaagtaccctttttaaaatattttatttagaagaatttcttatttcagatacaacagatgatacaagttgaatctagtagggtttagtaagagacaataaacatattaaacaaagccttacgtattttttaaggtgaaaaaaatcccccaagatagagtccgtgcttagaaactacccctgttaaatacttaatatataacatttgtaatgttcaaataccgaaagaaaaaaatgtacttgttcagagtctattcttgagtcaacctaccttctcagctctactgaccccaaacaaggtaaacaagctgatttaagttacaactaacttaaaaattatacatctaactcttttgtaaataactttagggctggtgctcaaaataattggaactagctatgaaaagaaagctagaaatgagaatgaggaaaattggtagtaagtgtctatagagaagtgtggaccatctgcaattcctatatttaaacagggagaagagggagatggggactcactctctccctcacaaccacatgactaaactggcccagccaatatctcatcaggtgtctccaccactttacaaagccactgggaatttatcaagggataaatacaaaactggtgtagggagaggggaatgggaagttacttccaaagactctgaccctgagttcttggcgtttattcttttttttgagacagtctcactctgtcgcccaggctagagtgcagtggcgcgatatcaactcactgcaacctctacccctgggttccagtgattctccagcctcagcctcctgattagctgggattacagacacccgccatgacaccctgctaatttttgtaattttagtagagacagggtttcaacatattggtcaggctggtctcgaactcctgacctcaggtgatccacccaccttggtctytcaaagtgctgggattacaggtgtgagccacygtgcccggcccttggcctttattcyttattttccctgatattaatccctaatgaaatgcatttagtacacattcatctttttaaaatgtgcagtttttgtcacagaagtagtgtaaaggacaccagaatggttggaagacgatttttgtggtcttctacaagtcctgttttggtgactctgagcaagtcttaaccttgcctacatttcctcacatttagggcaagtgtactcttcagggtcaactgcaatatctgtgggagtgctttgtgttttgtagcatgcatcttactagtgcttttgttgttgtttgcgttgtcgtgygggttccccacctcccccataacactgtaaagaaatgctgagactaagtggtagggagtggcagccatctggtgaggatggaaagttaatatctttatttatgtaataaacctccctttagaattctgttactgtcaaatttctcctggaattctaatagtattttcgctatgtgttttgaccttttgctattgggaagacacaagtttatgaatgacaaatgggtaggggaatttaggctgcacagttaagtaggaagaatgaagtctttgctagagttagaatccagtttgaccttgaacaagttactcaatgactaagctccatttgcaaaatcgttttgttaaagggattagaggtaacatatctacatatgtacatgtgtacagtggtatggagaatggactggatgaatgcgtgctgttaccaatgtgataattactattctttttaaaaatagagtattttatgcatacacaatacttattcaattcaatttgccttagtgcacagtgatggaattttagaactggaattgacttcagaaataatctggtaaacgaaatcttttcgaggctcttcattttatggttgaggaaactaacatcctgagagctaaaagtcatcgttttcctttaaaatatctaaataatcccagatgttggatcagaactccaaagtcataatcagggcttttcctatttctatagtatttctaatactataacatgctattgctcagtcttttattctctaattccatcctggtttctagaccaaatatacctaattgtattctaacccacaagtacctcatcaatgagaagtctgacctatggtttatgatttccgcagacttaaatcaaccctgggcttctatccttatactagttttattttatgttttttgtttgtctttagagaaatgatcgtgttctgtcatccaggctggagtgcagggacataatcacagctcactgcagcctcaaactcctgggctccattgatcttcctgcttcaacctgctgagtagctaggacyacaggcacgcaccatcaggcccaactacatttttaaatttttttctagagacgatgtctcgccatgtttcccaagctggtcttgaaccctggcctcaagcaatcctcccacctcagcttccctaagtaccaggattacaggcataagccactgagcccagccccacccttacatgttttctcttggcatcctgatccctggacacaaccccattgagatacccttccatttaatacttttcttagtcatttaccaaatgtgtttayagtaatatattcccatatatttgtggcagagtacagcactcatataaattttgatgaacacagacatgctgtcccatacttgtaggtaaaacaatcatgtgaaattaaaataaatattttgtttagatagatcttgactatcatacacttattctaacaatattgcccattcctcaaaacattctgggaactccttgaaataaaactgactatggtaagaagagtttttctgggagttgggaaactgattccattagaaggcagatggtgatagtctcacagcacactctctcccatgcggtctctattctacaggcatgcagatatttccaaaagcatcccttccctccagggtcctgaagaccctacctctggttctgccttggactgctctcagtgatattccctttttttttttttttttggacggagtctcactctgccgccaggctggagggcagtggcaccatcttggctcactgcaacctccgcctcccaggttcaagtgattctcctgcctcagcctcccaagtagctgggactacaggcacgtgccaccacgcctagctaatttttgtgtgtgtgtgtgttttttttagtagaggtggggtttcaccatgttggccgggatggtctcgaactattaaccttgtgatctgcccacctcggcctcccaaagtgctgggattacaggcgtgagccactgtgcccggccgatattcctgtttttatggttgcaattgtatgctatggcaccggtactatgtgggaagaatgatgctaggtactctactggtatggcctcatttgtcgatttgaggattattggtttatttatgcaaagcacataggatcataggattgctctctaggagaatggagtaattaataccatgaagactcatagacaatgcttcctcccctagaaactcattatttttcgaattttggcactgatctttcctgcctacttcctggcttttactaccttgtgaaaaagccccaagtgttagaagcagcttccccagyttactgccatcccttctaaggtccctggacaccactgcttgtctcctaccttagaaagtgcctacttggccaggcacgctggctcacgcctgtaatcctagaactttgggaggctgaggcaggaggatcacgaggtcaagagatcgagaccatcctggccaacatggtgaaaccccarctctactaaaaatacaaaaattagctgggtgtggtggggcatgcctgtagtctcagctacttgggaggctgaggtaggagattcacttgaagccgggaggtggaggttgcagtgacctgagatcacgccactgcactccagcctggtgacagagagagactctgtctcaaaaaaaaaaaaaaaaaaaaaaaaagtgcctactcataccctcctcctatttattctgatttctgtgcatgtattctttttgtttgtttgtttttcagagacaaggtcttgctctgtcacctaggctggagtgcagtggcacagtggcatgaccatagctcactacagcctcaaactactcctgggctcaaaatgatccccctgcctcacctaccaagtagctgagactacaggcaaatgccaccatgcctagcctgtgcctgttttcttaaggcagaaatgatctaaaagtgtggcagagggaaaagaagatgggacttagagcttaaataaatctagatgaaaatgttggttctatcactcacaggttctgtgatgttagggaagttaagttatttgcaataaaaattattaatattgtagaacatgtattgatcctatgtatcaggcttgaattaggtgctttaagtgggttgtctcaattaattcatcactctgattttcaattttctgttctaagaaatgagatcaaatatgcctatcttgccgaagagtagtaaaaattagacaggtagctgcctctggatcctgcagggtagagaaagtattacatatctgcatgtgtggatgtgaaggacacacagatacataaggtaaatgagaatttattataaaggtgtatttgacaaaaattggggaaaaaaggaaaattggagaagatatctttctgtgagattaaagacaaataggggaaaaaagggaccaatgacaagaattagagcaaggtatgtaawgaattccagagctggctctaagagatagagcagctggtcatatrtgaaagggatgattcattcttcaggggctatccctcgtgatcctatttccttgcacaagctatcagttaatttattgattcacctcctttatgtgctcataggcatcaagaatacaatggatcacatacaattacagaaaagtttcatttcaggaggtcaaacaggaagtttctttctgacttatattgaagtactcatgatgacaatggagaaaaatgaacataatcttttatgggtggggaccatgtgatctcttttctttcaagctccagagggtttataagacatttccatgttcaatttgattccggaaattatatgttgggtagaacagactcttttyggcaactcatgagaattgccaatgatcccagcatttgctactcttgatagtaattcccttcatttcctccatttttatacatgacctgcagtaaatattgacagttactttgctggaaagaataacacagagacagcttttcttaagctccaaactgaatttcgtggttaattgattggccagctggccctgccgtctcttgacctctacaagagccagcaagattgatggtttcagcagcctttcatggtgcactaaagcattcagatctatcttttgttatttgggaaacactaagttcttatgtagcacattatttacatggactcaagggctgacgagctgggaggcagcaaatgcccaaatggaagacaatgtatgtagatcaaagaagccgatgagacagagagttcataaaatgtgaatacaattccaggggagaattgatgattatggaagcagaaagccaattgagttaaatattcattccagcaacaagtctgatcgtctcactgggacctgtgcctttccgaagtttcctcakcttttcaaggtctacacaaggaaagaacaaagccatcaaggaggctctcattctggaaagccggctgcaagatggcatgaaccagaggtcagcggccaccactgagagttcatcgtattcgcctctgtaaagaataagcctcaagcagtggttctgcaggagcggttcagcatcatcaataccaatgagccctaatgaatgtgacaattcagaatgattgggccttttcctccaaaacgtttttctcctcaaaagtaaaacaggcttgaaactcatgtcttatatatgctgtttagattttcatatattaatgtcacgaatcagatgataggaaggtatattaacaagtgagacattgggatatggccccttgttcaagagcatcaaagcattaaatatgttgttttaaaaatacctttggcatagttttaccacctatttctcaattgccatcaaaattttaacttttaatgacttttggaagtaggttagatggggtggtgggagaggaatagaggatacagaaagataaaaactaaatccaaaaatagtattgaatgagaattactaataagaattattaattgagtgtcttctcataaaaatagtaatatctgttctttggtctctcacaatacatagtttaactccatatataatttaatgaatgcaatgtgtcactttggttataggtttgcatcttggaaacgatgttagtagaaacaagtcagtttccctctgttcctttttgcttagctttctgggctatcttcaccaatgccacagtccatctgtaacagaatgcattggagatttgaaaaatcacgacagataataaatctctatatacttctcatcctctggaacaattgagacattgaaattgcctgatctttttgagtgagtgttgccactttgacccaggcaaatgagaaataaaacaacaataccaaccagcagtttcaagtatccttctgctgcataataactcagcagtaggctttgctaatggtgtttatgagctgccaggctagaattggcccttaagcagggaggcatttgcccagtgggcttcttccatgtgggggggcctttttgcagcctgggggcccttttaggtgattctcagccggagcggtctcttcaggccaaagacttttgcaatgagctaactatgttcaattattgctttcagatccaccctacattcaaatgttttgggacaccaatgtaataccataaaaatgactgtgtaggacacgcctatgctaatgtcatgactggtttgttttacgtattatttatttatttgatactgttaataaaaagcaaacaagccaaaaagaaatactccccaacgtttaatagagatcattgtatcctaaaatcttatagcacattagagtgcaatgaagctcaatgtaacaagcatcaacaatcaactacgaaatgagtatggaaatagagtatatccaaggaagacagaagtgtagaccacatgatgacagcgggataaagacaaaggagaaggtaatcgagagccaagggttaaaccattcaaattgtcctttggcattaaaatgatccaagatgtttcatgagttcaggttaaaaaaggaaatcagtaaaccccaatatactttaagtttcatttgacgcccacaagctgaaactacctctttgtggtgtgtgtctttacatcagcaaagagtataattgaatttggttattatctccagtgctacctgtttggacctgctatttcaccttcctgaaaactgttgcattgagttctactggggaaaattcttaagataacatctgtttactaagaagggggtgtgcttacctgctctaaggtattgaaatacattgtaaatctatacctaattcatataaacataatttcaaggaaaaacaaaaacataagagacagaccctggcggagtgccaaagaatttgtcagggtcccagtccctgtaccttatgggagaattaaattcattaaactgggccagatgtggtggctcacactggtaatctcagcactttgggaggctgaggcaggtggatcacctgaggtcaggagcttgagaccagcctggccaacatggtgaaaccccatctctactaaaaataaaaaaaattagtcargcttggtggtaggtgcctgtaatcccagctagtcaggaggctgaggcaggagagtcgcttgaacctgggaggcagaggttgcagtgagccgagatcgtaccactgcactctagcctgggcgacagaatgagactcagtctccaaaaaataaataaataaattcattaaactgaacaaattgagcccaatttatttgtcatagttcaaagaaaaggagagagtagagtaaaggggcttagtgcaaatgtctggtcagatactcaaaggtttagagcctcttaacccttatatttctttacataatttattctcattattttttgtttgttttttgagacagagccctgctctgtcatcagtctggagtacagtggcgcgatctcagctcactgcaatccctgcctcctgggttcaagtgattcccctgcctcagcctcccgagtagctgggactacaggcatgcatcaccatgcccagctaattttttctattttggcagrgatagggtttcaccaggttggccaggatggtctcaatctcctgaccttgtgatgtacccrccttggcctcccaaagcgctgggattacaggtgtgagccaccacgcccagcccattcttgtttcttggtaaaggaaaatccaactatatatatcttctttaggatcacytaaagacccatacagatctgtcaaatagacatccaatattttggtaggctttgaaaggaggtgcaaaaggatgagaaggaatttagggagatcattatctgaatcattgaacaaatgctccttaagcacctggtgaagagaggctactgagaagcagagcacgtggtcccagcctacgaggtgacaaagtaaaatggcagaagcaatttgtaatgatctcacctatatgtggaatctaaaaaaaagtcagcctcatggaaacagtagaaaggtgattaccaggtctgggggctaggagagagatagggaaggggaaatgctgtcaaaggatccaaagtttcagttagacagaaaaaataaacttcagtgatctattgcacagcatggtgaccacagttaaaaataatgtatggtacatctccaaattgcttaaaaaaaaaaaaaaggtttcaaatgttgtcaccacagaaaaacaaaaacaaaaacaaaaaaaacaaaaaaaacgaggcaaggtgatggagwtgttaattagcttgatttaaccttcctacaatgtatatgtgttagtccgtttttgcgttgctgtaaagaagtatctgaggctaggtaatttgtaaagaaaagtggcttattttggctcatggttctgtagactataaaggtagcgtggtgctagcatctgcttttggtgagggctcagaaagcttccartcatggcagaaggcaaagggggagcccacatatcagatggtgagagggagcaagagttgagggggaggtgccacrctcttttaaacaaccagatctcatatgaactcagagcaagaactcactcattatcgtgagaacaacaccacgctattcacaagggatccacccccatgaccaaaacacctcccactgggccccacttccaacactgcgggttacatttcaacatgagatttaaaaccatgtcagtatacatacatacattaaaatatgcatcacattgtgccctatacacatataaattattgtttgtcaattaaagaaagaaataattttaaaataaataggccaggcgcagtggctgatgcctataatccaagcactttgggaggccaaggcaggcagattccttgagcccaggagttcaagagcagcctgggcaacatgatgaaayctcatctctaaaaaaatacaaaaattagctgggtatgtggggggtgcacaggtagtcccagctactcaagaggctgaggtggggggattgcttgagcctggcaggcggaggttgcagtgagattgcaccactgcacaccagcctgggtaacccattgagaacctgtcttaataaataaataaataaataaacaaacaaataaaggttgtgttagaacaaaaaagaaaaagagtgacaatgcaagccacatagttgaagttgacattaactagcatgtgccaacgagtgacaaaggaaacaagtgcaaagcaagaaaagttagccattatcatggtccatagataatactctcaaccccggctcttgagtgaagcagtattgtgcagtggttacatttatggacctaatggtcaaactgcatgagttcaaatcccagctttacagctawtggttgcattatcttgggcaagtcatttaacatctctgccttaattgattcacctctratatagagctgataggagtctgaaatagctgctataaggactaaatacattaatatatagatagcattcataacagtgttttgtggactttccgaaggtgctgggccttccagttgccttaaagaatggattggattagggtggaggagatgaaaaaaggcatcacagtacatcaagtgmatggtgccagtgtaagtagaatacaggaataaggaaatgcccagcttgttggggggttagtatgaagacctctaactgggactgaaagttctagcaacagtaaaataccctggcctccaactactaagtaccctgaatactaagatgagtttatttttcattctatagacaatttccatctctttctttcaaaacaaacaaatgatgacrctgtatgagtaacagaagatgactgggaacagaaccgtgaacagaattaagcacctgcaatcaaataaaattcacagaaaacttaatttaccacattagtgatatgcataatcgttgttgtrctggtaaccagctcttcaggaaaaaaaaaagaaaattcctgatttgttaaaatactgtcactatggcccactgaaactatcaaaatgaggcatataacaggaaattgggaggagagttatacaatcagctcttgctagaaaatgatgatcattgacattacccttatggaaccaatccaaatttgggsgttgttttctttctttctacttttgtgtgtgtgtgtgtgtgtgtgtgtgttctctggtatctgtaaataacatccatatcagtttctccatccattctttgcacatcactggtaatgcctgagatcaaatctgccatgcttttccgggcagatccaggctgggatctcagtatccctgcttccctgaagctgtccaacctcactcccttcattgctctgctgtgattaggaaggagccattccaaggactatggggtgctctgtgggataagcccagtccttcttccatacaggaggaacaggggacgggtgctgacaagaggaaatgcatggagcagagagagggaacaggcagatggactcaaggtccccagactctttcgagtgttgartcagaaggactggagctgtgggggaagagggtgggaacagggtagtggaataacatgcagacagatgggctgaactgaaggtccagaggcactcccagccgtcaaccagcagttcttacaccaggttgatgttagggaacaaccccagctttaaaacttatttataccaaagtgccaaatgactcatttgagacaaggctttgatctctggggacagggcgttagacagcatgaggcttaggttgccaggtgtcttcccacagttcctgtcttgtgtatgttacacactcaattcatgtcaggatgacactacattggcatgatccaagggaacccataactgacatgaatatgtgtgtgtgtgttgattggggagatgggaaagagaacatttcttccagattttctagttcttatagttcataatcttaatcctcatctccacttctctgccacttctctggctaaatccaaagcacagcctggctagagaggacttctcttccttgggggttctagtctattctctgagttgtgacaaacatttccattccctgtaattacccacttgccttgtctctgaagaggcattcacagaataaaccaaaagaattgtagtgttaggaagatgtcaaatcatttgacctctactccatctccggcttttccttctccccccatgaaagttatgcatttagttgcctcttgttcattagtctggacttagagcaaagtgactacttcaacttcttgtgctcaacatatgccacagttgcttacatgtgataagtccatttgtcacttgataagcctttgctagaatttccttctctccatctccaaccttataatgatcttgaaggcaatgtcggaggctaggtaartcttctttgtgttccccacttgagcataggtgagctgtcatgtcaatttccttacactactgagaagaggggatgtgggtgggcagggacccccagaaacaactttacccctttcacagtttccatcactgcctccaatgtccaccgacgttagaaagtttgggcagaagtggccaggtgcggtggctcacgcctgtaatcccagcactttggggggccgaggcgggcagatcacaagctcaggagatcgagaccatcctggctaacatggtgaaaacccgtctctactaaaaatacaaaaattagccrggcgtggtgtcaggcgcctgcagtcccagctactagggaggctgaggcagaagaatggcatgaacccaggaggcggagcttgcagtgagccaagatcgcaccactgcactccagcctgggcgacagagcaagactccgtatcaaaaaaaaaaaaaagaaagtttgggcaaaacctagagtttcagggaaagtcatttgaggtttggtttaggcaggaaatagaacaaaaccagtgtactaaggagaatacagtggaaataagagggaaaggaatgaagaaactggtaggctactaaaatgcccaggtacaaactactgaacatccacctttatgctgtcagtgggcagaaaaagaaatagacaatgacaagatacattttgaattagtgtgatttaaggactggctgatgtgcacaaaacatgagagaagggagtcaactttgacagagatttcaagagcagatcactgatgaaatgtgataacattcagaaaatagagaagttgacatgggctttgatgaaaacacaatgagttcagtttgaagcattttgaagtcaaggtgattttgtgaaatacaaacgatgctgtccagcaggcatagaatctatctggagycatttgtacaatatacctatgccttttttttttctttctcctactgtagacttagataggaactcacttttgtcttttttctgctaggccaataaatacgttctcagcttagaaaaggggctttttggtttgcctatttctgtttctttttacagaagttaacacatttatttgtgacctattaaaatcatgaagtattaccactgggttttatgttttaatggaaacatttcatgtttagagaataatgatgcttaaaatttatatgaattaaaattttagcctgtaaaaagagcctggaaatatcttcataccatcatctatccttccacttaaatattaatcacaaagaagatcaggcgtagtgaacatacaccacgcaacctcccattcagagaattcttgtgcaaagaaggattccaaagggtttcagaaatactaaacttcttgaaattgaaattgaaattgaaatccttcttggcttctctacctgttacttcctctgcagtgctcagtatagtgtctgctctccctcctttctttttctttttttttgagacagattttcactcttgttgcctaggctggagtgtaatggygcaatcttggctcaccgcaacctctgcctcttgggttcaagcgatactcctgcctcagcctcccaaggagctgggattatagtaccacgcccagctaattttgtcttttcagtagagatggggtttctccatgttggtcaggctggtctccaactcctgacctctggtgatcctccctcctcggcctcccaaagtgctgggattactggcgtgagccacacacccggtctgctctccctcctttcttcacttttctgcttcctctctcatattaataataagcttctatctttccttaattgtttacatatctgtctgtcctctttctccaccccacgaactcctcaaaggcagagtccctgtcttttttatttcatatccctaatggtagctgcaaagcagacactcaagaaggaaggaaggaagtaggtgggagaaaggaagaagaaaggaaaatgaaattaactactagtttgtttccctgtttcattgagaacacacgtattaaccaaacaagtaaacaattgtcagaatattgcattttaaactcctgagagaagttgctgcttctgtggcatttctatctaattaagtttccccttaaagttgtaatcttttctttcaaatctcataatacgtcttatttaggtgatcataccaattatatctttcccactcaaacccctaaagttatccttgaataaatgagccttgcaaattatatttccccaatttgcacttatttctttcttttttttcttttttctttgagacagagtttcactcttattgcccaggttggagtgcaatggagtgatctcagctcactgcaacctccgcctcctgggtttaagcaattctcctgcctcagcctccyragtagctgggattacaggcgctccccccctccccatgcctggctaattttttatatttttagtagacagggttttgccgtgttggccaggctggtctcaaactcctgacctcaagggatctgcccacttcggcctcccaaagtgctgggattacagatgtgagccaccgcacccagcctcagaatttcttactgaataatccttttatagtttgttataactaacwcaaaacagtagtgggagttcttattcagatagctaamaaattccaggcacctcctgtactataagtgtccctcatagcacaaaggggaaagctgccctttaagaatccataaatgcaatgaaactctacttacgccacccaggttgttaggacacaggaatattaatctggagaagcctttgataatagaatatagtcaaagttgacattgtgctagaatatttgaattttttattttccagaaattattttcactctttgctacatttactgtttgacctcaaaagaatgtaaaagcaagtttttaaatacaccattatttcctcaagaggctacagaattgctggatttttttttttttttggaatggagtcttgctctgccacccaggctggagtgcagtggcaygaccttggcacactgcaacctccacctcctgggttcaagcagttctcttacctcagcctcctgagtagctgagattacaggtgtgtgctcccatgcctggctaatttttgtatttttagtagaggtggggtttcgccatgttggccaggctggtctcaaattcctgacctcaagcaattcacttgccacagcctcccaaagtgctgggactacatgtgtgagccactgtgcccaacccagaattgctggaacttaatgccaactctcaattgtctttccttctgctagatctagttaatagcaggtgtctgatacatgttactgaagtgaatatgaaaaatccagagtaagcaaataaatcatatttttttaattaaaaacatataaagtacatttttgtcaaatgaacctaattggcaaagcaaaatctcatcttttaaatttctgagtttccactattgataaaaaaaaaaaaaataacgtaaaacagtgttggattttcaaactcaaaagaaagaaaaaaaccacaaaaaacaaaaaaagcagaagttgggtaaaaacgagttctgactaaaagctgcaatactgyctcaaatgtgcccrtgaccccacctattgctcaatttctacaccatgagggtaaagggaaacgaaatgcaacttggattcacttgacttcttaagtcttacagagagagaaactgatcagaaaagatacatttttggaggttggtttttttttttaattcttgcttgtaaggcagggcttggtgactcctggtctcctccaatagcctaattttcctcccaaaagtaagcttttgattccactagggtgggcaagtatctttgtactctgccatttcagagataagagccaactgattttagaaatccaagagcaaatgaaatgtgcaacattttactcttggattgcttgagacygcatctgtatgcctattccctggagtgcagactgtcttgtgagcatttggtgccactgaactctgaaaatcagggcatgcagcatctgctggggaacacaatctggtttctgtggatcagaagcatttctctacacgttagagtcttaaggatttttaaagagagcaggtctactcaggcaactcgttaccgtccctttcaaccggagtcagaactaagaatgctcagcagatggttgtggagtgaggtaaatttacatgcagccttcagtcattagtgacagatctattttaaagggacgaggttgtgcaacaagggtacaaaggcagctcatggttctaattgttgggctccattagaaggggtctttctggagactgtggtttcttagagcaccgcagtctacccctgaatgaaaggcatcctgctggctaattaacttgcagcactttcttctctattgkgccttgattttttgttttgtttggttttaatctcagaccttgtttctagtaggactgatggagtcttccattatttcgccyaaatattttatgaagaacaragtttccaatcactcactcactctgatttcattacttttagcatacttttcgttcttataatctgcaataaagaggaagactattaagattcaagcttgtttgagcaagtacactgccagagcaaaatcagaggaattcatggaagactgggaaggtgcaagtaatctttctcttagaattgtgatggtaacatatgaaataaaatgtgggagcaaatgaagccattgaaaagagaggccattatacttctgaccacttgggaaataccccccaaaatagctgaaaggtcccaagaggctgggcacagtggctcacatctgtaatcctagcactttgagaggccaaggcaggcagatcacttgagcccaggagtcagagaccagcttgggcaacatggcaaaaccccatctctacccaaacaaacaaacaaacaaacaaacaaactagccaggcatggtggcaactgcttgtagtctagctacagcttccatgaattgttcagtgatgctctcttaactccatgatctatggaacaggcaggcagaaatggagagacagtgggtggaggggaggagcctcaratggcacagaaatctgtagcatctagatcagagtgacacctcagagtttcgagtaacgacaggcacctggcccatggctgggattgttaccagtggtgaatctgtgcaggtctgcagcaacctcaattcttccctcyttaggataaaaacttcattgaggggcataaagcagaagagactgaagcaagttttagagagggagtgaaagtttattaaaaagctttagagcaggaatgaaaagaaagtaaaatacacttggaagagggccaagcagacatcttggaggtcaagcacagggatttgaccttctgacttgggggtgtatatgctggcctatttccagcacttcacatcccttttcccttgattcttcctttaggatgggctgccgcatgtgtggtggcctgctagtgcttgggaagtgagcatgcrcagtgtgtttactggcgttgtacacatgctcacctgaggcgttcttcgggtgaatgcccccagaaagtcatgtaccagttaaactctgccatttggcctcttagtgcatatgtgtgagccccctgcscaactcctgggaccttatcgggaagctgataatcaccagtttcagatttttcctatttataaaaagactgcctttccctggagctggctgcaaccaattattttagagagacagttaccaaccacctgttcatcacttgatggtggcctgacattcctggttagggcggggggcactgtcctgctctgctcatgtctgcctacctactgtagcaggaccacaggcagacttttcttaaggagactcccagctttcttcctggtgaaggacccagagtttgtgagcccaggactgcagataatcaaaaatattaaattatggaagctaaatatttaaaataataactcataatggctctccaaatgtctgtaaaagsatttcacttaacaatasctggcaaatattatgtcagtggaaaatacagccaagttttggctcatccaaaatgttgtcatcaccgccactttaatatttaagagattaatgtttcaaggctcttccagaacattgtatttggagtctgattgaaagactcctcggtcctccctcattattctttatgtgtgactttggatgctctcaatacacttaaattgtatgtccctgtggggaatggttctcaaagtgtagtatctggagcagcagtatcagcttcacctgggaacttgttaaaaacataaattcttgcagctggatgtggtggcacatgcctataatcccaatgggagaccaaggtaggaggatatcttgagcttaggagtttgagactagcctgagcaacatagtgagaccccatctctataaaaaataaacaaaattagctggacacagtggtgtatgcctgtagttctagctacaggggagtctgaggtaggaggattgcttgaacccaggagttcaaggctgcagtgaactgatatcgcgccactgcactccagtctgagtgacagaacgagactctgtctcaaaaaaaaaaaaactgggggccacacaacagacatactgaatcagaagcctgggggtgtagctcagcttgtattttaacaaggcctccatgcaattctgatgtgccctccagttttagaattgatgctctgtgcaaatgaacaggtactggggcataatgatatgcaggactgttcttgagccaggctttgtattcatgaagtgggtgatagttgattggcattgtttcagtactcagtagctatgaagcattctattggtatcattrgtattaaatatggagcagaagcataactcatctccctcatggccacatgaagaaagatcagtatgttagagctgaaggacacctaaagccccaaacaactgccagagaccaaaatcatttgtctcaagaaatgttaacaccctttttgtgttcaagttttattatttctttactaaaattgcccattcacccctttgttttatttttcacacctaaaaaagtagccaagtttgaaaaagaaagagtgcttgccaccctttctgtccttaaagtgaaggccttgtctatctcattctgatctctgcccatccatcaccattcagcactcctgttgtgacttcgccccatctccaatcttacrttttattttcttggtacttttggtcatggctgtgttgatggtttcagaagaatacatagtatattaaggggtaacgtttacaaatgttcttgagagaactaatttttcccccttcatctcaaggtgtcactgcttaattattacggttcctaaataatctctatgatgtggttaactatccctaccttgcagaaatcctggaagatgagacggacctagcatgttgtgtgagcaacatctcttagagataatcaatttgatatcagcacaattattgtggctactattgaaatttctcttagtttcttagattagtactattggaactaatcrtaaataaccaatttacaagaaaatgagtctcattatattatagcacgaagaggatatattcaaggagatacacctttgaatctattatttcratatgcttataaaaattactattttaataaatttcccagtcaatcctattgtgtagaaaaagatgcttcactgcttacatattttaagatgagactgggaacaagcagattaatttggttgtgagactgggagtttatgagcaaaatgttcttctgtgcaaacgaagtagaagcttcatttcccttcccttcagttaaccctatgttattggatacgtaccaggtactagagattctctccctgggtagtctggcttagaatggctccccaggctctagccatctgcatagctgctagaggaaaaagctgttttagttggctccaagaatgtctctgggaattataatgtattcatagaaatgagtgtggagtgcccacttgcacaatggaagatccacaataatacacctggatctgatagcaccttcctgaacttgggccacttccctctttgaggtttgtgaggccaaagggatatacacagaggctgcctttgtttgtgattacctgggaattagatggggtatcattcccccttatatccttttactatagcttgttcacttttgaaaaggtggaaaactagactaaattctgtattgaaaatgtcaagtcaaatatgctatataaccaagaaatatcagtatagaatatcatgtattctacacaaagctacattttcaatataatccccgtaattatttcactcatcaaagaaatgtatccagctgagacataaaaccttagtcaatacattaagaaaaaaagaaaaaaaaaamcatttttttcccagtcatggggaccagattgtgtctattattcatcagggcctagcacaatgttgagcacatgctcaaggtggccaataaatccttgtggaattgagttatatgggagtcaattattcggtcacagcactggattaggaggttgagttcttgatagatttactttcagctgacctgtgtgacatttggtatttggttttgcaactttgttttcagttttttccatgcaccaatactcctagaattttgcttttgcctcttttcttccctttcatcttttttttttttctgtagaaagcatacatccatatagaagacctctctcaatacattccagatctgagttgcagtgcagcacttagcttagcttgtgaaacactccraagacttgattaatatcatcctatggagagatgtccttaagtaacttagaatggatcctttatttttccagtaaataaactctaaaatatgaggatttccaaggtgaaaagaaagagtacgaacccaagaaatattttaaatgaatcttgttttccgtccctgtgttctgagtaacatctgtattcacccctgcctttccattgattggaaacctttagtattctttgtactctcacagtcctagtttctcagaactgtctgtcccagtctaggcagttgtttcattaaacaaatgttattaaacaaataattttgagtgtgtgtctggtggggaggggaggctggggggttaaattcatgtatttttaggcaagagtattaacaagaattgtttgaaatatttctgaaaccatagtgtcataatgaaaataaaaataaggtggagactggattgtaattaacacagagcttttccatccaagacagagcttaaaggcctctgtttgttgggtcactttaaaaacaaaccctactgccagggatttccaatggcaactttaccgtgcttacccaaatggaggtaattaacaacccttctgtgtgttaaattaggtatccacagaattgggaagcttcagatatttattgtaaaccagagcctcttttcttgttaatctcctaagacagcagactagtgactcgcacccattagaacaaatgaactaagaaactgaatgacaggttctgaggcccctaagaagaaaaaacagagtctggattagagctgcttaacagaccactcactggggcatgctccctccccacgcccatttcctatcccagaaaataacaaacttcagatgacccgccaaaaacgactaccttttatatttgtcgttgaattatttcttctttgtttaaaattaaataatgcaagtgatttttttgctttagaaaggaggattacctcttcctagacatccagttgaaaaaccaactggtatagaagggaaatgcatctcaaacagatacaatgacattcttataattgcctcatttgaaatggcagcatttccccgtgctaattrtcatccttcagctaatttggtacattaaaggagattgttattaaaaacaaaattaaatccattgccagcatctttattctctaccagaagaaaaattttaaataaatgcaaatacgccagttttgctcttaatgttgcctgaagttgaaaggatgaactttgacttgaaagataatgagttccccctgttggaggatytgaggtttgggttggataatcccagatgatgttggaatagacagaatttaaggttccttctaaccctgaaattctatggttataaaatctatccttttcttgaaagaagaaatattaaaggtgttttcaaggaaatggtagcataatgaaaaaggaaacacaaaaatgatttttttttccttaataagcagtcacctcacttggtaatagtttttcttcttaattgcttgtttgtttgtaacaaatgcggtggtgtaatcaagtggcttttacaataataaaacacttctctcaattaaactgtactgcaaggaattcaaagatgaacagaagtgttccttcttttaagatgctgatttataagcatccctttaaaatttacttctctttctgatgataaaagtaatacaygtttattgtagaacatttggaaactaccagggactataaataacccatagttgccccaccagagaatattcttaatatttttggcatatttcttccatatatctattcatattcacattcatactaatttgtcatattctaatttaaccctctctttaatgtttataatgtgattatactactttttaacacatgaattgtctccaaataaaagccaaagtgatccatttgttaattttttttaatcctacccagctgaaatggacaaagaggagcccatctcactcgggggaggggatcaaagagttatcctttctcttgatcaattctgtagcaatcagccatgataagaagcccaaattaccaaattaacaaaaagaattttatttagtggccatatataaaagctaaatggacagttggagacagacaacaaaaactaatataaaactaaaaatgtgaaaattcagcatttaatgaaaatgagagcttagaaaaactagcatccagatttattcagactgaatttctgccctgggaaattaatgaatcatccttcagttcccttttgtgtctgtgcatccagcctcattgtccttggtagtaaattatgtacaccccctgtttccaaatcttcaaatacggtatgcgtcataaagtcacaaaatgtgtaatttgggtcctgtatacaaattctagccagggaatggcttgtagtcatgctaaatattctttacaagttgtgtaacaaagacaaagaaaactacaaaaaaatacagagaaacataaaaaatttcccattccttctgtgattctgatgtatttccctttgattctttgcttctacattgaaatagacttagtgggtaatactaataattacagttaacagtgaccaggtgatatggtttgactaggtccccacccaaaatctcatcttgaactgtagctcccataattcgcacgtcatgggagggatcccgtcggaggtaattgaatcatgggggaaggtctttcctgtactgttcttgtgatagtcaataagtctcacgagatctggtggttttataaaggggagttcccctgcacatgctgtcttgcctgccaccatgtaagacgtgactttgttcctcttttgccttccaccatgattgtgaggcttccccagccatgtggaactgtgagtccattaaacctctttctttataaattactcagtcttgggtatgtctttgttgttgttgttgttttgagacagagtttcactcttgttgcccaggctgaagtgcagtggtgtgatctcggctcactgaaacctctgcctcccaggttgaagggattctcctgcctcaccctcccgagcagctgggattacaggcgctcgccaccacgcccagctaatttttatatttttagtagagatggggtttcgccaygttggccaggctggtctcgaaccctgacttcaggtgatccacccgcttcagcctcccaaagtgttgggattacaggagtgagccactgtgcccagcctgtttggttttgtttttgttattgtttgtttgtttggagtatgtctttattagcagtgtgagaacaaactaatacatcagaagttctgattttcatatcagcacagagaaaagtgaccttcccagtccagtctatcgtattctcaaattactttctctaacttgtgaaataagatcttcttggtgaactttatcagacatttctgaacagaattaccactctgtggtggcctgggtaaatgtaatatatttataataatttgaaaagattcctccaggacttttacaaagacagatgatattaaactgaacaaatagtgctaggtaagaagtaaattgttcaattttttcacagaagccctgtagattttagcaaaaccccccagacacaatgtcaaatttctcagcaggtttcttggttttagctcttccccttaagcagtagttaacagaatattagatgtkagtaaagttatttctttgttattctacctgggttgactaccagagaaaatccctgaacattttacaaattgctcaacagattttcatctaaaactagaaaagattggccagttatggtggctcacgcaggaacattgctttagcccaggagctgaaaaccagcctgggcaatagagtgggacccccatttctaaaaaataatatcttttaaaaaattaactgggcatgkcggtgcgtgcctgtagtctcacctacttgggaaactaaggagggaggattgcttaagcccaggatgtcaagattgcggtgagctatgattgagccactgcactccagcctggaggacagagtaagaccctgtctcaaaataaaataaaataaaattagaaaggataggtgtgtktgggagggagactggttaaycagggtgcatgggattatgtagggcttgtctttcatttgagttcttctctgtctttttaaaatgactgattatatatattaggtcccaatggcttcattatcactattattttaattcataggttaaattttataaacatgaaaaataattgacaagcctagaatctcttttctgtctatattagaaattaaattatatttagtakttaagcaatacatgcatacatctcatgtaatccttactgtaattaaggatgaaattatgtaacataggaaaagcagatgtaagttctcattctccttttacacataaggaaattaattcagacttttagtaagttgcccagaatcacgcagctagtaagattcagaactaaaaatataatacctgtcttctaattcaaatgtttcacatccaagtgcccatatactaataatttttaactcttttgttggggttaaatgagataaaattgagtcttattgtatagaatttatcagaaatagcaaaatttcgcccaggcacggtggctcacgcctgtaatcccagaactttgggaggccgaggcaggtggatcatctgaggtcaggagttcgagaccagcctggccaacatggtgaaaacccgtctctgctaaaaatacaaaaattagctgggcatggtggcaggcacctgtaatcccagctacttgggaggctgaggcaggagaatcacttgaacctgggaggcgggggttgcagtgagccaagactgtgtcattgcactccagcctgggcgacagagagagattttgtatcaaaaaaaaaaaaaaaaaaggaaaatctctaaaatgatacctaaaatgataaacaatttaaatttagcataattatcattttttaacttacagattgacatatttctgcaagtgttttcagaggcattggggccacagaagtccaagtcaaggcaatttttggtactaaacagttgacttttctctggtccacatcaaagctgccactgtgcagagaactaacaygtgtaygtgactagtctagggctggaggaacatgcgaggggactgttggaaaggaaaaacttttgctcttcctctaggttcagtaaattagggactgtaaacaataataatgaaagattaataagaggcacacaattttattttattttattttatttacttatttttttgagacagagtttcrctcttgttgcccaagctggggtgcaatggcacgatctcggctcaccacaacctccccttcccgggttcaagtgattctcctgtctcagcctaccaagtagctgggattacagacatgcatgaccatgcccggctaattttgtagttttagtagagactgggtttctccatgttggtcagcctagtctcgaactcctgacctcaggtcatccactcacctcggcctcccaaagtactgggattacaggtgtragccactgtgcccggccccacaattttattaatatttatatgcaaaagagcttgtagaaaatcagtgaaaatcaaagaagtggttagactagggggtttataaacccttcttaaccaaggaaagagggtttgggcatcaatgagtggcgaattgtggagaagtgactagaaaatgtatgagagaaactaatggaaggtatattagttcattctcaagctgctataaggacatgcccaagactgggtaatttataaatgaaaaaggtttgactcacagttctgcagggcgtggaggcctcaggaaacttacaatcatggcagaaggagaagcaaacacatccttcttcacatggcggctgcaaggagaagtgctgagcaaaaaggggaaaagccccttataaaaccatcagatcctgtgagaactcactcactatcgtgagaactcacttactatcatgagaacagcatgagggtaacagcccccatcgttcaattacctccgaccaggtcccttccatgacacatggggattatggggactacaattcaagatgagatttgggtggggacacagccaaaccatatcagaaggtaaggcctattttagtaagttttgtttatgcaaactcatctcagtgttgactccctatctttataacatgggtcacttttttcttcctgatggtgtgggggagagggcacctatctcaaagagaaattttgctctgcttttagatgtacaagggaaagacagagaactgttcctgcatccattgattatcaattgccttcagctcaaaataatccttatgccaaagtagcatattttggggtggcatatttcaacctccttcatctctacccagctggaactgtccagggagttgcatacctcaaaagctgagttggtggctataaagacaagatttgggttagttcctgagaggtaagagacctgcaaagggaaagaacatagatcagaacgagaataaataagcagaaaagagcaaatctcagcacattcccactgatctcactaaaccaggctcctagtactggaaataggtcagtcaacttcaacaattgtatctcatttcaggaagcagcatgcaggtgggagtggggcacccctctgaagtttggcctttatgctatgtgaataatcacacacttaaagagaggcatttctatgaaaacaaaagaaaaacaaagattaacagttggagcagactctaaagccagtttttgagtccagaaggcagttagttggcaagatttctaaatgttggattcaaggctgggtgcggtagctgacatctataatcccaacattttgggaggctcaagtgggagaattgctcgaggccaggagttcaagataaacccgggcaacacagtgtractccatctctaataaagtcatccaaatgtagttgtatgcacctgtggtaccaactactcaggaggctgaggtggacggattgcttgagcccaggaggtctaggctgcagtgagccatgatcacaccactgccctccagcctgggcgacagagtgagatcctgtcttaaaaataaataaataaataaataaatgttggatgaagtgtctttagatggtggattgaggataacaggggcagtctcagtcacgtgcatttcccggagtttgaargaacatgttctggtgagcttcctgagtggtccaaactacggtagtgataattcctttgaagttaggttcagttgtccaacttcagcttccagggctccaagaaaagggcaattgtggttctcagtgatgccaagtcacaagggtgagagaagactggaaacattaattacaagatggcaggattcagtttataaaggggggaaatatctcaatgataatgaacattcacaagggtgggttatagttttccattaaaacataaaatttctttctacaatcacccccaatgtgatcaaaaacaatcaaagtatgtctgcttgtgtctggcaactgagtctagtctcattaaacttggccagattatttacataataagtgcagcaagaatagtaatttagcacgtaggcttttttgtgtttgctcttctggaacttttaataaggactctcagaatagacttttaaaagctcttgagagtagtaagccaagccaagaactagccattagactttatctgtaatacctatagattggggtgaatttcccttttcttgaggactctaaaacattctgagtttcccgggcctgccagaaagttaccttccttacccacctgtaaggctaggaacgctataaaccagatacgagtcttacttttccaagggagctttgtaagcgttggtgccatatagtcaaccttagttccttaaaactattgggttatatgtgattccacacacattattttcaaacatgacactgcagtcaaagccttagtaggacagccaatgtttccaattgtgttctgttccaaggagaatagattcttatggaacttaggcaaataactatattgccatgaaaattgaaatactcaataagcatttctgaattttggagagatcaggtaggggcaaaagataaatatttcatttttgtttatgaagacataatctattaaattattgtgaattacaggtagcttttagaaagggtttcctgacatccagaagatagaacattaaataaccagcaaggtttcaatcaaaaaggccataaaaattataattgttttttatcagttcattcagtcccatgtaattaattcttgttttgcttgatcttagattagtggatttatgaatccatcagcttctccattagttctggaaatccttactgtgtccagtgttataatcttgaagttatttaagcaatgtcagcagaagcctgtactccagagtacctgccaaggttttgttcatgaatctctaatatgctctttctttgctgaagatgaggcatgctggcctacagctgactgcgtgagccttcagaaaagcatcggcataaaacaataattatctgtgaatgacaatgacttaaaatggccatacctaaagatctgatgarwgttcattataagtcaattgataaagaaatttggtygtttctctgacatacaggattttaagataataatgtgataccaagacatctcatgaacagcaagggcaytgacagatttctaggaattttatatgatttctgaaaaatcaaaatcattatatccatacaaatataacccaggaatggttaaatatcttctctttatttgacagtgcttcccatgcaatttagcatattaaataagctcatctctctttttacaaactgagagaacaaatcctttgagagttttccaggggccctctgggaaattccagagtcaattcaaggtcaagaagacttcatttggaatttgatttagggaagttgtgaaaaacgtgaaaaggtttgaacaattgattaaatgggatcacagatcactataaaacaatacttagttatctatttaaccaaagtgacaataaaagattttcaagataaatatggaagataacataatcataaaaaattttaactctttcaatcttaagaaaacttggttttctgaaataatcaaagacataataagtgcaacataaagcacagaatatttattttctaggtgtatcactcaagaggtaaagaaaacatttcataatctcttaccaagaatagactactcggtatagtggctgaggcctgtaattccagtcctttaggaggctaaggtgggaggattgcttgaggccaggagttcaagaccagcctaggcaatatagtgagaccctgtctctctaagaacaaaaaatagattaataaaccaagaaaacttgctcattttaaaagtagttttgcatcaatacactactgtattagtccattcttgcattgctgtaaagaaatacctgagattgggtaatttacaaagaaaagaggttgactcrcagctctgyaggctatacaagaagcatagcagcttctgcttcttgggaggcatcgggaagcctccaatcatggcagaaggtgaaggtggagtaggcgtcttacatggcaggagcaggagcaacagagggtaaggggtcaggtgccacacaattttaaatgaccagatcttacgagaactcggtcactatcatgagtacagtaccaagagggatggtgctaaaacgttcttgagaaatctgcccccatgattacaatcacctcccaccagagcccacctccaacactggggattacatttcaacatgtgatttggtggggacacacatttaacccatatcaactactaagctcattctttaaaaccttataaatacacccattcagtcctagccagcgtggccacacaatgtaagattctctctctcttctgttctctctctctctctttcactgacctttacaactttctatatcaactcacatttttgtcctttattttcgtctttcttatttaaatgacctctaaactactctaggataaaagtcactgtcatttttctttaacaaaaacacatctcactctccttgtackctttgcctgcagagttttgtttcttcatcctattattactagtagttcatttacayatatttattagatttcttaacccttagtaacattaactttcagtgaaaatgaagaaataaacaatcataaactgtcagttacatacatgcattctgtgctacattagcacaggtataaatacattctctcataatttctagaggcatgtttcctaacagtacaacttctcagtgtggcaaaagagcaggtttattaacagatccaaatacctttagtctctgccaaattaagaagtcaaaagtagccgggcgcagtggctcacgcctgtaatcccagcacttcgggaggctgagaygggcggatcatgaggtcaggagatggagaccatcctggctaacacaatgaaaccccatctctactaaaaatacaaaaaaaattagctgggcatggtggcgggcgcctgtagtcccagctactcaggaggctgaggcagaagaatggcgtgaaccagggaggcggagcttgcagtaagccgagatggtgccactgcactccagcctgggctacagagcgagactctgtctcagaaaaaaaaaaaaaaaaaaaaaaaaaaaaggaaayaaacttaaatagataaactttagtaattagtattttggtattttattttctttgaaattatctacctatttcatgaatatccgtcatttaacttagtataactttaagatttcaagtaaccaaaaagatgtcggaaactatttttaagtcactgtactataaaacagttattgttgaaataaagtttgtcagagtaatgactcaatctgaataaaatgccatctataagtttaatagccttaaacctcagtagttataatgttagtttgactagtaagtccaagtagaataaaatgtatatttcatgttgacaacttgaagacgtaactctctttaattaaagaaataatattaaactggtagtagcggtgaatccatacgggtatgcagcatccttacatcttgcctccttagaagaaagagttcagctgacggacatacgcagagtgagagaccgaggcaagttttagagcaggaatgaaaggaagtaaagtggaagatggccaagcaggcgacttgagagatcaggtgcaccgtttgaccttctgacttggggttttatacgctggcatgcttctggggtcttgcattccttctcgcctgattctttccttggggtgggctgtccacatgctcagtggcttgccagcacttcaaagggtccgcatgcacagtgtgtttactggacgtgtacgcatgcccacttgaggtattttttcccttagcaaatccagtgttcctagaggaaggtcatccgccattttgccttttagtgccatgcttgagcccacttacccaactcctgcgatcttagccggaagctgctgatcagcagtttcaggctcttcctatctgttgggagcctgcctttccctggtgccagctgcaaccaattattattttagagagacagttaaggactgcctgtccatcacctgatggtcgtctgacattcctggttgtggggaaagggaacmctctcctgccctgctcatgtctgactagctacctgctgtaacaaaactagttttatttaccaaagattatcttatatcagataaacttgaaaacatgttggttatatttaaccattaaataatatatttggttatatttctgagtgttttagcaatacttataagygtttttttaagccaacttagaatagaactcatttattaatttggtaataccatcatgaagtgaggaaatgtcacataggtacaacgtacatacatatatacacacataaacatataaagatttatttattttaaaatttaatttatttaaagacagaaacagatagagattattttaagattttagccacaggtcaggtataaatatagaaacacaaaactcacaaatttatatgagctggcatttttgtctttttaaaaaaatctgaattgtatttctggcagatggaacaagaggttacctgctcaatgagggttaaggctttttatcaatattgttggtggagacttaaaaaatttttttcttgacataataatttaatgtagacagtagcattagtctcaggttattgttttagtcaacagaaattaaagccaggtgacttttgggctggaaatcaaagttattaatatttccttaggtgtttacatatcaaagagatggccctcaggtccttgagaagacagttttgggtggtagaatattttacagctgaaggaggaagagaaaggatgtaaactttcaagtagtccctttaaaagggagttttcgggcatttttgtctgttacagggttgctgcgtatcattgttgttattatcaattgttattttctgggacaaacagtaaattcttctggtagcactaagctttrtcaagcaggcattttaaaagtggggttggggggatgatttttgatgggtgtgaattttaagttcttgtctaaatctaatttatgcttgttaattttgttaagggagctatccagtctaaccatgatacacttgtttccttctttcaacttgatcctcccataggtagcaatacgatgtttatttagggtgagagctctctaaatatccttttaaacataaaagctttttcaaatcccagttccatcatctggtctttgacaatttaggatctccaaaggtatacgtgctccaaaatgtgacacaaaaccagtaagacttttatgactcaaaaccaatcatccattttatggtttaaccggggaccaagagttgtccccagagagggtgcagaagactctgccctcatgatggaaagtcattcccaaaaatagccaaagagaaagcgagctgagaccctcatggtcacaggcagcaaaaatggtgtttgtgaaaatggtatctccagcgttacacaaaagtgaggcacctgcaatcacagacttgtggacctgtgacacttgggaggcaatacggagatgggactttttcagcmctaataagacaatgaggaaggacaacaagtgccttgtatgagctgagacactttatttagacaaattccccagattgctgacatagccaggtgggaaattttgctagtgttttttagggtccttgactgacagcgagcacctccagactcaggcccaaccacctgtgcttcccagtgggcaaaaacacagacagaggtgaggcgtggtggctcaagcctataatcccagcactttgggaggctgaggcaggaggatcacttgaggccaggagttggagaccatactgggcaagatagcaagaccctgtctctaaaaaaaatttaaaaattacctggacatggtggtgtacatctgtagtctcagctacatgaaggctgaggcaggatgattgtttgaccctgggagtttgaagttacagtagctatggtcgcaacactgcgctccagcctgggcaagaccttgtctctttaaaaaagaaagaaagaaaaaacaaaacaaaacaaacagagcatgctgttactagatctaagtcaagttctcgggacagaagggaggacttcatcgaatttcttttttattggggacccacaacaacatttgcccaaagggtctgtagtctgctgagaactttaaagtcaccagtctgtgaggctggctcaaacaacaggcttatacacctgtgccaatattctattctatgattttcctccttatgacaaacaacacaaaagacagagacaaagagaaaacaatggctgtctccaggaggaaaaggattaatcacaaaagtcctcaagccaaaaatcacaaaagtcgcaatacccaaagaattatttcttacaaatgttttctcctgccaatctaaatttggagaggaaaagacaaggaaatgctcatactgcactccctcaaccaggctctctgcagaaatcttggggggtatgtggggggatctttttgactgggcatggtggctcacacctgtaatcccagcactttgggaggctgatgcgggaggatcacttgagtccagaagttcgaggctgcaatgagctgtgattgcaccaccgcactctagcctgggcaacagagtgagaccctgcctctaaaaaaaataagataaaaaaagcagtttttcaagggtgtacaatctcctacagcattctatctattctttgattaattaccctcaacccatttagccattaatttattgaacaatgtattagacatccacttcgttccaaagactctactttagggttgaaaaaaacctaggggtgaacctggcatggtttttgccctcaaaattcttaccctatgatgggagagagggaagatatgttcatgattaagctctaagtcagaatggtgaaaaaaatcctttatagaagtacaaagatggagcatgcctcttactaaatagttgtaagagcgagcaagagttactaaagcacttcaggttaaggggaggcagagggtaaggcaggttagtgatagggtacttgtaaaatctccaaagcatgaaaaattttctaatgttttgaagtagcagaatataaagtttgtaggagacaatgtccaaagaagagactgaaatggtagtttgaagccagtctgtgaatccattgaatggaacacttcacagtttagttgcctcttcttgattacagagacttacagaggcatttcaactggaaagtgtttgatctgctttgttcatttgaggaaacaactttgctggctgtgaaaaatgataaacagcatgagggagaatttgctggcaaaaaacaaaacaacaacaaaaaaactaagtttataatgcaacagtcccattaaagagtaacatgaggtgcccttatatacttttagtggcaatgtataacatttggaagtaacttggtagtacttattaatcctttgcaaatctttgcccaaatgagtgacagggtctcactctgttgcccaggctggagtgcagtggcatgaccttggcttactgcaacctccacctcccaggttcaagcaattctcatgcctcagcctcccaagtagctgggattacaggcatgtaattacatgcctggctaatttttgtatttttagtagagatggggtttcaccatgttggccaggcttgtctcaaactcctgacctcaagtgatccacccaccttggtctcccaaagtgttgggattacaggcatgagccaccgtacccagactacaaaaatgtatttatggggatgttcaatgcagtagcagctcatatgtccattcatagaagatgggttaaactctgacgtagctaaaccagctaacacttttcaaccattaacaaagaatggtagagtggaatgtggtggcacatgcctatagtcctaactactcaggaagctgaggtaggaggactccttaagcccaggagtttgaggtcaacctgggcaatatacaatatagtgaggccctgtagagatctataatatgttctgctgtaaacatawgtccacaatataagggccatttttttttttttgagacagagtttcacactgtcgcccgggctggagtgtagtggtgcgatcgctgctcactgcaacctccacctcccaggttcaagcaattctcctgcctcagcctcccgagtagctgggattacaggtacctgccaccatacccagctagtttttttttttttgtatttttagtagagacagggtttcactatgttggccaggctggtcttgaatgcctgacctcgtgatccacctgcctcagcctcccaaagttctgggattacaggcgtgagccaccgcgcctggcctaagggctattttttaagttgcaaaacaaaaacaaagttttaacagttgtcattctgatatgtagaattattaggaaacctacactatttattttttatacttgtatatactttgtggttttgttgttgttttggttttttgtttgtttgtttgtgtgagacagagtctcactccgtcactcaggctggagtgcagtggggcaatcttgggtcactgcaacctctacctcccaggttcaagcaattctcaggcctcagcttcctgagtagctggactataggcacacaccaccatgcccaaataatttttatattcttagtagagatggagtctyaccatgttggcaacgctagtctcgaactcctgacctcaaacgatttacccacttcagcctcccaaagtgctgggatcacaggtatgagccaccgtgcctggcctatacttgtgtatactttgaattgtttcttttttcttttcctattttattttattttattttatattttattttattttattttttgygacagggtctggctctgtcacccaggctggagtacagtggtgcaatcatgactcactgcagcctcaagctcctgtgctcaggtgatcagcctcctaggtagctgggactacaggtgaccaccatcacacccagctaatttttgtattttttcatagagatgaggtttcaccatgttgcccaggctggtctcaaattcccaggctcaaatgaacctcccacctgggcctcccaaagtgctgggattacaggtgtgagtcaccacatccggcctgaattgtttctattattcacatataactttgtaatcttaaaaaaaatacttaagactttaaaacaaagatgattagagcctggattaagctagtgtcggcagcctgaggagggaaggttttggatgccattgccaaagtagattgaagaggaattggaatttgagggatgcaggtgattaaaggagagggggaagagtcaaaggtgacactcacatttctagcttggtaaattggttgtttgtttattccattaatagaaatagagaaaagagacagcagaggagggcttcattgaggaggatgactttgttagtttcattttggatttaagtctgagggtcctgaaaaggcagctatatgtttggcttgaacctctccactttccaccttctcagtaattcattaatattttggatgtcctagcctgttgatgtgtgtgtactggaggtggtggtggtgggagctaatatgtttagaagttaacatttcatctgtctttatccttttactctcctttcattcagaccctacaattattgctacagggaagaaatgtggccttgcctgtgaaaatctagtttttggaattttttttgcttgttttccccctaaaatttagctccaaaagagagaagattcttaactagtggaaaaaatgtcttggtcagaaacaggagaaagaacatagctatcctagacaaaaataataataataataataataataataatcataaaagcaagggagggagggagaaagggaaagaaagagagacagaaagaaaaaagaaagaaaagacaggaaaggaaagaaaggagggctaggcatattgcctcgtgtctataatcccagcactttgagaggctgaggcagaaggactgcttgagcacaggaggtcaaggctgcagtgagccatgtttgtgctgctgcactctagcataggtaacatagggagaccctgtttcaaaaaaataaaaaataaaaaaaggaggaaaggaagaaaattccagtagaataaagaaaaaaggaaaaagaacaatatttacaagtacctgcagagagaaggtgagaagatgaagacctgttttctacttttttgggcagcactgctaaagaaataaaaaagtacccagaagtcgcaggactctaataaaatggaacatcacctctattcctgcctgttctttggaggagtagaaggtgaggaaatggggaagtgcaggatgagtgattctggagaagacatggctgtgctcatgttgggctgatgatgtcactgataactaaaacaaagggctcagccaggcacccagaagcctcagggccaccgcaccctaaggaccatgcaggctgagacaggactcttttcagtaatccggaagatggctccaccctctctagtccaggccataccctgggccatacccttagcagtgctacccaaaaaagtaaaaaacaggtcttcgtcttctcaacttctctctccaggttcttataaacattgttctttttccttttttctgtattctgttggaatcttcctttctttctttctttccttttttttttttttttctgaagcagggtctccctatttttttccatgccataccctgaaaaaaatctctggggagaggatcccaaagagacaaaggctaattttctcaccatgcttatagattaggggctttgagaaaatgagggtatgtttttaaagtattttaatagtggactgatctattttacctcctggaccagatgaaatgggaactgttccaattcatggagcaaccagacatacatgttcaaayaattatgaaaaacatacaacagatatttatcaacaaatacatcagtaaacaaacttacatgaccctgcttggccatcactgtttcttttcaacacacacacacacatttacaaatacatatatatgtgtgtgtgtgtgtctgtctgtcgatatatatgtgtatatatatatatatatatatatatatatataaataaaataaataggtaagagctgcttatagccctgaatccccacagaaaaccccgtctgtctttagtttcatgaaagcattgtactttttctcattatttttcagaccatcacagacacttctgatcagtgttccacttaagcttagccccaaatacacagaggaattttatactgaaagttaaagaagcgacagtagttagattatctcatgcctcctagattggctggctttgagcactttttcaaagtgtgtaccaactagggtttgtccaccaagttgcaatggcttgtatttgagtcagccatacgtgctcatggataaaaacaataagaactctttattaatataaatatactctgtgaaggcaaagatgtgctttaaaggaaatttctgagcatgtgagaagtagatgagttacatgaggttaggagcatgcagctgtgaccctaaatggggagaatacagccccagggagctgtgatgcacggccactgggaagctaatgaaatgggcagagccaggaccagtggggtagaattaaggcagaagcttccctcttgtgctggacattgtgctggtctctttcctgcccagcacatgccaggtaggaggctataatgtgatcatgggtcattccatgccacaggaatggattggcctgagctggccttcttcataatccaggaataaggagaagaaagaggtaggacagaagatggtcctttatgggggatgagggggatggaggggggaagcttctagaggaattggaattttcacagaaagacatttctgcttagatactaatacagacgtacatatttggacaatatacatgtagaataaaaattatttgaattacttcaacaattatgcctacttttcaaaaggctttgacatcagctatataatttagccatttggcaatattaatcataacttactaaactaaatttgacattgggataacagaatggtaaaatgcaaactgaaatcatagctttatgatcacatgaatttccttcaacagctgttcactgttattactacttatacctttgttagcattccaagaggatctgataatcatagctagcattgattgagcaattattatataccagacattcttctaagtgccattatctcatttaccctacataacaaccttatatggtaagtatcttttcctagtgccttttattgatgacatgaatgaggcacagaaaaaataggtaacttgttcaagtccacacagctagttagtggaagagcaggaattgaatccaggcagggtggtttcaatacttcagtcttagacataataccatattgccttcctggtacaatggatgctttacgtaggaggtgttatagggagaaattcccacattttcctttttatacttgtatattgtttgaatttgtttataataaggatacatctcttttgtaacttgaaaaccacaaagaagaaatagaacaataaccccattcctttaaaaatagcattgcagtagctatttcaggtagtgagatatcaaactggttttaacttttttgtttatttgttttagttttaagaatatccaaacaaagacggatacatgtgaaaacttgggacagtaaaattgtgacctttctataaagacaaagaggtaggaatcaagccaaagtgagattaggataatgtcaggtcttagtactctattctgcataatagtttattttaggtaattctctatattggttggcttgctgaarctggtgtgtgtgtgtgtgtgtgtgtatgcgtgtgtgcgtgtgtgtgtgtgtgtgtgtataaaaaatctttttagtcgttcttttttatttgtgcttctcaacatgcttaagcaagtgatatctttccatataaggggcaaaagaatttggggctgtgaggcaggctgacaaagaggaaatatatcctgtctaagcaagcaagaaaaagggaaaggagtgaaaattcttgcaacatttagctcttccgaaaaaaaaaaaaaagtggtcatgatttctcctatagtagttgatttgtcactttacacaaaaggcctagaaacatatccattatagatatgcctccttggggctcagcctctatctgtcaagtaggggtaatgggtcaatggaattgattatgtgatctataaactttgttccagctttaccatattgtgaattttgaggtttggtcaatgaatatgcaaatccaaccagaagtatcattggatacaaaagtatccgtatcatttttgagaataaaatttccaacagcatttttatatatatcagtgaagatctgtgtcacaaaacaaaactttatgaaataggaaataatctggctgatctttgacagtacaaaatttgacattccaagtcaaattttatgtttaggtagaatagggaagtattggttttgcagttttaccatatcaacacatataatatttctgcatagaaaaacggaccatctaaatgggaaaggggagagccaactagtgggtaaaatgctgtaacagtattttaatgctcaaggcccaattatgacttgaagatgttgttgtactgattagcaatactaactgaaaatttttctaacaggttcataacctaagtattttccagctatatactgttggtctcagggattggcaaagctgaatcagaacacttctttgccaagacttgtctgcaaattcttaacctttttttgtttgccaagaacaaagaaaaattgttgtaaacttagctgctgctgtaacatatgagcagtcttttccgaaaatgcaaattagacaaacaagaatcattacatcatttgcagaaatgcagttacatttggtttctgctattgtgtgtgtatatatatatatgtatatatattactttcatatcttacttgataccttttgtagtgctttaccattttcaaagcacttgcatatgtgtcgtattatttgatcttttctgagatccaaagtttttaacatgcttcatgcttgaaaactttgatacttcaatttatatgatgcatgtaacatacaacaaatgttttgattatggttgtatggaaaattcttattatatccccaaatataggttacacattttggcaaagtaagcagttattgatttttattgccacatgaactggattttcaaatattaccaaatgcatgtgtttttgtttttgtttttaatacaaaaacatcatctaatggatagtgatttatgccagtatgtaggaaataagcaagtattttgggtcaggtggattactgctgaagctttgattaggcttgaaaatttgatacactggaaagctaactgttaccctatagattactaacaaactcattgcttcaaataaaactgttattgattgttcagattaaaaaaataatgtcgacttttgttttagattcagggggtacatgtgtaggtttgttacacaaatatattgcataatgctgaggtttggggtatgaatggtcccatcacccaggtaatgcaagcaacatgattttattcttttttatgactgtgtagtattccatggtgtatacatatcacattttctttatccaatccactgtttatgggcacataggttgagtccatgtctgctattgtgaatagtgctgcaatgaacacgtaagtgtgtgtgtctttttggtagaatgatttattttcctttggatatatacttagtaatggaattgctgtgttgaatagtagttttaagttctttgagaaatttccaaactgcttttcacagtggctgaactaatttagattcccctcaacagtgtataagcattcccttttctccacagcctcgccagcatctattattttttgacttcttttctgactggtgtgaggtggtatctctttgtggttttgaattgcatttctttgatgattagtgatgttgagaatttttttcatacgtttggtagctgcttgtatgtcttcttttgagaagaagtgtctgttcatgtcctttgcccagtttttttgttttgttttgttttgagacagggtctcgctctgtttcccagaccagagtgcagtggtgtgatcagctcactgcagcctcaaattcctggctgaagcaatcctttcacctcagcccccaaatagctggaactacatatgtgtgccaacacacccagctcattaaaaaaaattgtagaaacaaggacacagtatgttgcctgggctggtctcaaacttctgagctcaatgatcctcccaccttagcctccagaagtgttgggattacaggcataagccactatgctcaggcctttgctcactttttaatggggttatttgttttttgtttattgatttaagttctttatagaatcttgatattagacctttgcccactgcttagtttgcaaatattttctcccattctgtaggttgtctgtgtactctgtcaattgtttcttttcctgtgcagaagctcttcagtgtaattaggtcccacttgtcaattttgtttttgttgcaattgcttttgaggacttagccataaattatttgccaaggccaatgtacagaatggtatttcctgggttttcttctaggattttaaaagactgggatcatatgtttaaatatttaattcatcttaatttttgtatatggtgaaaggcagcagtccaatttttcttctgcatatggctagctaattatcccaataccatttattgaataaggagtcatttccccattgcttatttttgtcgactttgtcaaagatccgatggctgtaggtgtgcagctttatttctgggttctttattctgttccattggtctatgtgtctgtttttgtatcattaccatgctgtttttgtatcattaccatgctgtttttgttactgtagccttatagtatagtttgaagttcagtgatatgatgcctctggctttgttctttttgcttaggattgctttagttattcaggctcccttttggatccatatgaattttagaatagcttttctaattctgtgaaaaatgatgttggtagtttggtaagaacagcattgagtctatagattgctttgggaaatacggccattttaatgatattaattcttccaatccatgaacatggaatgtttttccatttgcttgtgtcatctgtttgtttctttcagcaatgttttatagttctctttgtaggtatcttccatctccttgcttagatttattcctaggaattttaacttttgtgtggctattataaatggcattgcattcttgatttggctctcagcttgctgactgttcagattattgttttataaaagccacaaaaatgttccattagctaaaagtcacgtttcttagttaatagaagtcatagtacataagaaggtaagagtgtcaaattattactagttgtgaatgaattattactagttgtgaaagaatagcaattcatggttttgtttggtcagcaactactgcaccctagtgatgatgaattctctagcagattggaaagatacttagggagggaaaaaagatgactttattaaggatctctggaaataggaaaatatttaagaaattctataagtaaaaatgagtaattttatgtcagaataaaataaaatttggctgaatttatagttctccatctgcctgcttgcacctatttggggcttattttacctttgtggttaccctgagaagcatggtatggctggagcctaagtgagttctttgttttccaaccacattgtcctcttttctttttataaaatacatcaaattccttgcaggtttgtctgtctggagtacttacccaccttctttacttagtaaagtactacttcttttttaggtgtccatttaagttcaaatccttgaagaacttttattttgtaataaagattagattcatatctcctgttaaacactcttatagtattcaggatataccttctaagtggtacatgtggggcggccagcagaagaagattttgtattaggtatcacatttgagaggaaggaggccccgtggaaaaagcttcatcaaaagaaaacaaaagaggtgtttatatgtttctcaaaaggcatgtatctatgtgttggtgaaaactgccttaataagtattacatgtctaatgtgtgtatactaacatgcagctctacgaaatatacaaaaaagttaagcatatagcctatgcttttgaaagcttgagatatatttgngggaagtaactatgaaggggatgtcccatgtagcctcatatggagcataaaataatgaaatgctatttattatatgtcatgtatgggactggcctgtatggggtcatttgagtgctaagacaagatttctttaatttgcagtactttcccacaatattcatatgagttaatacattatacttaggaaattgcccctaagataattaaattaaaaatatattaccatattaacatgtaaacacaaattggtttaaatgttctctagcaaagatcaaatctaggacagagaaacaggagaagaaaacaggaaaatggggctcagagcaggggaatgctgtgttgtttaaaagccctggatgtcaagatctaaggaaaagataaaaaaaatagaaccaccaccaaatataaatatttatttccatatctcacaattttttcctaggccattgctggtgacagactttccagtccttttcagaacttactcatcacatccttttcatgcttgttattttgatcctgaacatccttgcaattcaaagagcatacagaggcagagtgaaattagcataatgtcacctattgctatgatgctcgttacctctacctccagaacatgccaaggaggcttccaggagccccagaaacacagaacagcaaatcttcaaaagcccagtgcccagagcagatagagaagaaaattctattttgaaatccataaagaatctcataattccttgcaatatctagtcccaattgtgtgggtgacaaactgacctatggcagaattaggaatgtgaataggaatgaggcttggagttccccattcctgctgccctaactcccactggaatgtaatttgtacaaagagtgacgacatgtgaagatgtaaaaaagaggactagagatgtcctcctgagctgcacaaggaagaaagctttttatgaccatccaattctgcaaaggacctagtttcccagtgcttattaccataaggatgcagaaagaaaaaagttcacagacataagatttcatgtgaaaaccaagaaaaaaaggttactgtattttttaaaggaatagcatttgatttggtgtaatggcaggataaagaaatgagaaataacagtggggaaaaaagttgactacaaagatgtgaataagatcagatggcatagtaattttattcgtaattaaaaatctggttcagttaatggagagatttaatttcaggagcattaactagtagactactggatacaatgtacatgtttaaataaatcataaataagtttctcctaagagctactttaatgttgtagcattctaactaatgagtagtatgacaaaattacgttgttattataatagcaatgtatcagtttttctgttgatgaaatttcttagggttagaatttttttttaccagatatgaaatagacttacacttaaatactgttgaaagttgccatataatgtggctattatcttggagttaattaaagttaatttagttttgagcattattaagctctttaagaaaactggaagacatcaaattcttataaaggaaagcaggacctatttgttaaaacaaaaagaaatagctctgtattcaagagtagttttctcaatggatactttgcccgtaaacattaaaactcactaacacttaaaataaatagatttgaatggatggctcttaccacaagttaaaggttgttatttcattaagctaaatgtagtacgtataactgatttttttttttgagggaggaggcattaccttggagaaggaaatggcttcagataacatctatgaaaataataataataataataatgagattatacgcaagatttgaaacattttcagagttggatagaaatttacacaaaccagatttcccctgggagatcctaagataaactaacaataatgtcacacacatatcctgttattttatttactaaattctaaattaaatttctgctctggtgctatgaaggtcacccagcgtactcttttagataatacaggagattccaggattgaaccaaaaccaagctaagcagaatattttccttccgagagatttgaaatttgtgataaacacgtttgattttttgtgtgacattatttggtaaaagtaactttttcagaagctcccccaaatctctatacccttctttgtgccaccgtgttttcttgtgtattggaggtggataagcaaactgcaattgggatagattttcacctaaatttctcacattttcataagtgttctgttcctcttatttactgcttgcaatccacatgtgtatactgcacacacactcacacacatatacacacacataccctcatattctaaagaataaaaacacaggcactgtaattgcatatgtgtatacttagggggttaaagcctggcttcaccactcagtgctggtgtgaacttggagagcttacttagctcaggtccttttgttttcttctgttgtttgtttttgagacagggtctcactctgttgcccaggctagagtgcagtggctcagatttcagctcactgcagcctccaaattccgggcttaagtaatactcccacttctgcctgtagctggtaccacaggcacgtgccaccttgtccagctactttttttttttttttggtagaaacagggtcttgccatgttgcccaggctggtctcgaactcctgggctcaagggatccacccgcctcggcttctcaaagagctgggattacaggcatgagccactgcatccagcctagcccaggttctttacctgtacaatggggataagagtactgatatcacagggtggttgtgaaattaaaatgagatatgtagagatatgtaaagctcttactaaagtgccagcaatataggaaagaacaacaaatgacatttactctttttatgttgtctaaagtcatatgagtatatagtgaagttttcagcataggctctgtgtgagaatacagtagtccccccttctttacagttttgcttttggcagtttcagttatctgcaatcaactgcagtctgaaaatattagataaaaaatcccagaaataaacaatttctaagttttaacttgtgcactattctgagtagagtgaaatctcgcccatcctgttctgtccctctggggacatgaatcctctctttgtccaggggatctatgctgtctacactccccaccctttagtcacttagtaaccatcttgatgatcagattaactgtcacaatgtagcagtgcctgtgtttaagcaacccttcatgtaatcatagccccaaagtacaagagtagtgacatcaacatgttattattattattgttcttttttattattaagtattgttgctaatctcttactgtgactaatttataaactaaacttgatcataggtatgcacgtataggtaaaaaatagtatatatagggtttggtactatccatggtttctggcatccactggggatcttggaacatattccttgtggataacggggaccactgtagaggcaaatggatatagaatatcctttaggtttatttttttgtctgtctttccctaaagcaataaatataaagaaaatctaaatagttggttttgacaacacataggtgtattatattctgcctttttagtgctcagtattccaatatttcattttgtagatgtgaaaattaaggtaatcaagggtggaaatgcttattggagatcatggaactggctcgtgatgcaacagtcatggagtgctggtttaaccgagttgaatacaacacgaatgcccccatgaaaagcaatgaatacagaagtgctcaaaagagtttacctaagaaaataaataggaagaataaaactcaaagacagagaaggtatattaatattcattatcactgaagagaagtaaacttaattttttaatattataagttaatgacctcaagcaaagtcagatattgaaaggtgatcgtttcaaagattgaaactgagtgaaaatatttcaggaaaagagagttttagctattcttaaagaaagagaaaaaagcagattcaaggatagctttttgaagaagatacagcttgaaatggcttcttttactccctcagttaaaagtggtaatggatgtgcctaactaaaattcccacaggaaaaacttctttagttcacctctctcttcctgctttttttagttgatttcctatgtaaatatgagagctcttaataaaaatatgacagaaagttggaaagagttttcctgaaataaataccagatgagtatagtggttacttgaattatgtgcagtaaaagaagatgatactctacaagctcggcttttcggcgacaaatctgaagtccatctccattgtgagtatttacttgtgtggcttggacttcctccattccagagaaagaatcagtcctttgggaatccatgaagtgtgtcctactgtgccaggcctcagccactaacacaggtccctagagagccacgctgtcttgctccatgacctccaatgagaaccccttcttactgccctttcattgattaaaacgagacatttgctgggacctcattgtgggctaagcacattgcagtcagtttccacataatgttgctcattggatcattattttaatttttctctctttacctcccccacagctgtctttccttatctgcaatgttgcatgcacaatatttactttcagcaaatgatgtaaatcacccttgaatgaaaagactgaaggtgcctcacctttcttcttcctgtcctattactgtgttctcatggccttggattttctctggataaccacgtatcctagttcatgcttttgtgtcataaggaaaagttggcactcccttttgaaaagctaaacttcccttcctgctattcatcctgacatttctgccctttattaggaacttgattcaacaattttctcttctcttatatcttcaatttctccctttcttgtttctttcctttaggcttaaaaatgtctttaacatccttaggtctttcctattgttaaaaacaagcaaactcagaatccttttctcaaacttaatactttgttgagttggcacccaatttgcctttttttttttttttgagacagggtctggctttgtcacctaggctggactgcagtggtgccatcatagctcactgcagcctcaaactcctgggctcaggtgatcctcccacctagcctgagtagctaggactataggtgcccaccaccacatctggctaatttttgaatttttcatagatatggagtttcaatatgttgtccaggctggtcttgatctcctgtgctaaaacgatcctccaccctcagcctcccaaagaagtgctaggattacaggcatgagtccacgcccagcccttaatttgtctatttttattgttaagtttctcaaagaaatgctcaatgcctgggtcaaggacctctacagatcttgagtctccttaggacatccctttccaactactcatctatttgatgccagattttctacatgtacttcaaccaaaacaacatattgcaacagattgaatgcagaagcagatatgagaatctgctgccttctatgaagcaagacattaaagagatttgcaaaaatgtaaaccagtgctctcttcttttcaaaattatttttattagggaaaatatatttttcataaaaactaggttatttatattactatttaatggagttagcgttgctatttttaaaagagtttatttaaaaagtcttaacttctttagtggtaatttctagtacggtaaacactggtagatttaacccacagaatcagaagctctttgggggtcctcagtaattttaatagtgaaaaggagttttaaaataaaagtagttgacactttatgaggctgaggcaggtggattgcttgaggtcaggagttcaagaccagcctgaccaacatggtgaaaccccgcctctactaaaaacacaaaaattagttgggcatggtggcacgtgcctgtaatcccagctacttgagaggctgaggcaggagaatcacttgaacctaggaggcagaagtgagcgagatcatgccactgcactccagcctgggagacagagtgaggctctgtctctgaataactaactaactaactaactaaataaataaataaaaataggagttgcaaacagtaggtctatatccgtgattgcttttcctcaccactgttgcctcctttttttaaatctctgaccaaagaactggctccacttggtgtcctgtatcagatttcttgggccggccatggtggctcattcctgtaattccagcactttgagaggctgaggcaggaggattgtttgagctcaggagttcaagaccagcccgggcaacatggcgaaactctgtttctataaaaaacacaaaaattagctcagtgtggtggcatgtgcctgtagtcccagatacttgagaggctgaggtgggaggattgcttgagcctagagggtggaggttgcagtatgccagaccttctagatacaagcaagcctcttaccttagcttcctgagtggctgtgatttccctagtcttttatcctccctagttgctaagcaatgtttaacagtgcctacctctcatttcttcttgatattctttccttctacggcaacaaattcccctgatttcttcccaaccttcctgactacccatctttttctctcttggttcctttttcctgggactgtattttcctcttagctgactcagtatgcttttccttaaagattttttttttctattgcccttccaaaattttttctagatccaaagcctttctcacagtgtcaagaaaaaaacattccagttgccagatgaacagcctgtttcagtatcatgggtctaaaaccagacaccggtttttcctccagcaattcttctggttaacttgatgcctctgtctatcatggaaaccgaatttcctaagtcatgcggatttaaaatgctagaaaatttcttactcctgtcaccactacatctaatgaatcagatgttctgtttgttcttgtgtcatcccagtccactccctgacaaagcatatctgcaagcttatcatcataaacctaggctatttcaatgctcacgtattaaccgctcatcacatgaatagaatttcatttgcctgatttaccctacacagcccttcaaatttatcaacgaaatcactggttttcaacttttatttttaagtaggaaaagcttttccgttaagtttttgcaaacaaatataatgcaatccaatatttgccctccagagctatgccgatttaccgctgaaaccttgagcaaagaaatactcaaagcttcttctaggttgtgtatgtatcacaacagaggaaggaaattatgagatgggcacttgggagactgttttcttggttgccctctccttgtgaaaggtagggctacaagcccccatttgagccaaagctaaggagtccggtgcccatgaaaaagacgcaagcaatgctgtcctccttgatggaggctgcagaggccagaaccacacctgctcagcctggccctgaggctgcccctgtggcactgctgaaagtcagtcttttgtcacaaggaaggcagtttttctagacaagattattctcatcttaagcatgaggtaggggtgtgtgtgtgtgtgtgtgtgtgtgtgtgtgtgtgtgtagtgtctaagtctacttgcctgctttctgggaactggtaagagataggaagatagaagtcatcatcattccaaatgtaggctttcacttaatttttctattttcagtctgagaccacacatttacacgtctctcagcctgcatccccaagctcaaaatatttctgctttaatctcttcagagactaaacctcctgtcccccactacatggagaaggcttggttacctgttattcaaggtgttgcctggatctgtgtatatactttaattcattccctctgttttcagcaccaacacccgccccctttcctcctagcttccttggtacttggtgcctccaatttttgaggctttctataattacttagcacaaatcaactttcttgttgattttcttctttataggagcatagatttcagcatttgtgactttgacaagtcagttgttacaaattcatcagctgcccatctgataaaattttaatgtcttttctactctatctcttctagcttttcttttcttgtgtgtcgatacccattttatttctttacttaccctcattttagtggcatttcaaaaggcgtactagttacctattgctatataacaaattaccataaacttagttgcttaaaacaatgcacatttattctcttagagtttctgtgggccaaggtactgggtgtagctcagcttggccccctactttagagtctctcacaaggctgcagtgaggtgctggccaagactgggatctcatgggaaggctcaaaaggaaaagcatctgcttgtatgctcctggagttacaggcaggttttagttcctgatgagctgatgaactgacagtcttgttctttagtgactctgggccagaggtcaccctcatcccttgccacatggctctctctctatagcagtttgtttaatcaaagctagcaatggtgagaatctgccaacaaaatagaagtcactattttgtgtgacataatcacagaaatgacatctcatcatgtttgccacattctattggctaaaagcaagtcaccaggcccgcccatactcaaagtgaggagattatacaaggcgtaaataccaagaggcagattagaggctattttagtctgttgatataggaggccaaggtgataaacacatgggtccaagtctctctctaaaactggagtcccctctctctcacttccatcaagcttacagtccacttctcctgtcaaggtcaagtagtgacctccatcttgcacaatccagtgaactatcccaagtgatcatcatactcaaacaaacaaccagtagcaactgacatattctcttcctgaggcattttatttctttggatttggggatccctcacctccttgtcttttcccttcatctcttgtctctgactcacaggctcctttgttcattctcatttttcttccttttggagggctaaatgctagaggtctacagggctccatttgtagcccttcactcttctgtaattgtacctaagaaatctagtctcatgacttcatagtccatgtatatattgatgactcttacatttatatctccagctccaacctttcccctatgccccagatagtacccaattggcatctgtacttggactcaaagacattgcaaacttaatttctcaaagaattaaaaatagaactaccattcgatccagcaatcccactacttggcatctactcaaaggaaaagaaatcattatatcaaaaagatacccccacttatatgtttattgcagcactactcacaaagggcaaaaacatggaatcaacctaagtgtccatcaatggattggataaagaaaacgtaatatatatacatacacatacaacacacacagacacacaccgtggaatactactaagccataaaaaataaaatcatgtcttttgcagcaacatggatggaactggaggccattatcttaagtgagataacccagaaacagaaagtcaaatattacatgttctctacttataagtgggagctaaatatgtgtaccatggatatagaaattggaataatagacattggagactcataaagttgggagggtgggaagggttcaagggatgagaaattacttaatgggtcaatatacactaaaagctcagatttcatcgctattcagtatatcagtataacaacaaaactgcacttgtaccttctaaatctatacaaataaaagctaaaaaatgaaaacaaattagacatctcaaatgacaacttaatgcagaactcttgatttcctcatccttccctgacctttacctaaaaacacactctgcccaaactgatgcccatttcaataaatgtcactaccttccacccagttgcttaggtggaaatccaggcattttctttgttcctcttctttttttcacaccccacatacacttctcactcagcatatcctgacagcgccaccttcagaatatgtccattatccaaccgcttctccccagttctcctgcaatcacccaggcgtggtcatggttgtctcttgcctccccttgactggtacatgtgccgttcccctttgcatcaagcttacatctgctccaggatgtttatatttgcagttctctccacctgtaattcttatccttctgatttgcatgtaactcactcctttttatcatccaggtctctccttaaataccacctctttggaaagccttccttgatcactctgtgtaaaatagccaagcctccgttattcactatcttcttttgctcttttatttttcatatatgactacgtgaaagtactgtctgttgttatatgtctagttacttgttatgtgagtataagcttaatcaaggtgatgctttattgcacttagcgctgtttccctgcaatccagtacaaagcccagtatgcaagttataggcatgtggtaagtgttggatatgtgcaccagttgttggacaggattgaacttgcgaggtcagctttctcaggtgacctcaaaggcaagcatctagtttattgagtagtacaacaataggtatgttgcatgtacatatatgtataacagaagtttatttttaagcctgaattagtgatagcaactctgttcatgagtgattatgtggttctttttcatctttactctttctcagagaaattcttctcttcttcccacattgtttgactgcttagagtagataatagaggagtggtaagatgtctgagtatataatgtaagggggtttggttcttgtcatatatagaatacatataggtcctattataaacaacatatggttcttctcatatatagaatacatacaggtcctattaaaaacaacatattgtagctttaattcaacacacgactggttcttgtataaagtttcactgagatctttattgtggagaattgcatgactattccagtcctggactcaatttgaataaaaacataggaaccaaattcctccactaaataactgattgatacttaaatttgacaacgatagctttatagaatagtccagaacatatacagtcgtacctcacttaacaatgtggctacgttctgagaaatgtgtcattaggcaattcccgtcattgtgtgaacatcatagggtatatttacacaaacctagatggtatagttcactacacacctaggctatgtggtacagcctattgctccttgactgcaaatccatacagcctgctactatactgaacactgtaggcaattgtaacacaaaggtatttatgcatctaaacatatctaaacatagaaaaggtacagaaaaatgcagtatagaaaataaaatatggtacacctatgtagagcacttctcacgaatggagcttgcaggactggaagttgctctgggtgtcagtgagtgagtggtaagtgaccgtgaaggcccaggacattactgtatacggctatagactttataaacattcttcacataggctgcactaaatatgtattaacaatttttctttcttccaaaattaacctaattactatatcttttcactttataaacttgtattttttaaaccttttgacttttgttatacttactttaaaacacagacacattgtacagctgtgcaaaaatattctttcttcatattcttattctataagctttttctgttttaaagttattattaattattattattttactttttaaacatttttgttaaaagcacacattaaacacacacacacattatcctaggcctacacaggatcaggataatcaatatcactgtcctccacctccacatcatgtcccattggaaaaagtccagggacagtaacacacacggagctgtcactttctgtgataacaatactttcttctggatacctcctgaaggaactgcctgaggctgttttacagttaactttttttcagataagtagaaggagtgcacttaaaagaacaataaaaaggatagtaaatacatagaccagtaacatagtcatttagtgtcattatcaagtattatgtactgtgcataattgcacggactagccctttataccactggcaggacagtaggtttgtttacaccagcaacaccacaaacacgagtaatgtgttgtgctacaatgtcactaggtgataggaattttttagctccattataatccttttttttttcttttttttgaggcggagtctcactctgtcgcccaggctggagtgcagtggtgctatctcggctcactgcaaggtccgcctcccgggttcatgccattctcctgcctcagcctcccgagtagctgggactacaggtgcccgccaccacgcccggctaattttttgtattatttgtagagacggggtttcaccgtgttagccaggatggtctcgatctcctgaccttgtgatccgcccgcctcggcctcccaaagtgctgggattacaggcgtgagccaccgcgcccagccagctccattataatcttatgggaccactgtcatatatgtggtccacggtttagagtatggaaatgactctatttccatacagtacttccaataataaattaagttgtttgatttctagattgaaaatggctttgataatcttgtaattggatttatatgcctttgagtctctcaagtagaactgatttacctttccattcctttctctttcctctctggtcacatccctattccacatttgttttttttgtaaccagatacacaaataatactttgtattaagtggttatagtgaaagctgggcattctgttctagtgaataatgattcttatattccaaggacaaactacctattaataataattgggtattcggggcttaaaagttgtatttgaaagatgcagccaggtgtggtggctcacgcctgtaatcctagcactttgtaaggctgaggcaggcagataatctgaggtcaggagttcaagaccagcctgaccaacatggtgacacctcatctctattaaaaaagaaaatacaaaaattagccagacatggtgggaagcacctgtaattccagctacttgggaggctaaggcaggagaattgcttgaacctgggaggcagaggttgcagtgagcagagactataccactgcactccaggcatgggtggcagaatgagactccatcagaaagaaagaaaggaaagaaagaaagagagacagagagagaaggagagaaggagagaaaagagagaaaagaaagaaagagatgttatccatgatttagtggaaatgagaaaacctagaaaataccatgcaattctaatgaaaattctagaaaactagaaaaaaggaaagagaaggaaattgagaagaccctgtaatctgttgaaatgctgagttttcctaattaaggaaagtaaaattctagtcacttaaaatgcctccaagaaagtcactgtttttgtccatttatatctttctgctttctttttcattttttccctaaaaattaattaaatattaattacttttagaggaaagattactctgataaaatggtcaagaaaagcaaagtttcttactttctgtgccaaagattttcagccaaagtaataaaagaaaaatcttaaaaagggaaactatgcaattcgaatggaagatccattttaaaaagttattgtggcagtataaaatgatactgtgtgctcaaatacctaaaaacttttgcaacttacgaaatggtatttttagtattacttagggtgttgtatgggtgtcttatgtaacttgttaaggtaaagaattttgctattctcaacttcagtttatgcatctataaaatgagaaagcgcaaaataatacttctacctcatagggttatcgtgaaagttaaatgacagagggataaatgaaatatttagtatagtgcctaccacaaaagccaaagctaaataagtgatagccaagaacaaacacagaaaacttcctaaataaaaatatgactagaataactgcaatgtatggaccaacataagcatgtttaagagtgaacacaggtgctattagtaattacacctggaccaaaagtataacccaggatgctccctgacatactagaatttatggtttctctatctataatctattaacatagcaggcagtaaaccttctcttttgtggagaccacacatgcaccagacaagcagagcctggattcaatagtgtgccagtaactcacccagattttcaagaagtaatatttactgggattatggattaatcagagcttgtgtttaccaaagtaaagttcaccaatgattcttcaaatatgttcacaagctaacttggcttatatccatttacttataaatcagaagattccccaagattttactgtctgcctgattaaagctagtatgtgctataagtgttttcaaaatacttttttccaaaactgtccttgcagttaaggtgctgttaattcaaagtacctatgacttcctatcagaaatgaaaatgacacttaatgagaacaaaacatgttttcacttgaaatgcaattaaaccaaattagagaaacagtgtttttctaactaagataaaaacagctgtgtttatgaagctgctctaatggtattagaatttctcttatggaaacttttgctttatttaagatatatgatttttattttaattgacattttagacaatgatactttcattacaattttttcagtcaagtatttctttagggaatctttcctataattcatagtgagctaatttgatcatgtattaatagagatttcatggagatttgtttttaaaggtttttatgtgaaacctttaaaaggcctcccaacaaaaactttacttcatgactagatatgatttaatcatgattatgtcaaaattgtaatttttaaaatgccttaagaaaaataatttctgcatacatttgtgtaatttttctaaaatgcaaaatttgtaacaatttctaaggtgtagaaaaaacatttacttaagttgctggtttttttaatattcatgtgtatgttttgggattttgtagatataacctatgccttagattactacatgttgatgtgacttgctgatgtttcaccaaaaaaaaaagaatgcttccatttctacacttaacatttttttctttatctttcataattacggtccataacacttggagtaacaacatgttttcctgtgtatatataatataaatggttatatacaaacaatagaagaaatacgcaatttcccaaaatgataacatttgaagacgtcattaccaacaacaacatcactagaaacattactgctgttaagagcttgatctagaaaatataagcttaaactgctctgtttggaaacagcatgtaatcgggatatttaactagaaattcaagtacaataaaatggatttaattagttatgtagctataaaataccttaaatttttttaggctatgtctgcatgggcaactacttaaatgtttttagattaatttattttagtcaatttaattttaataattacctcaactatatgttattttcttcctttaaataatcacagaacacgctgttttaggatcaggtagaagctgagacaatctcttttgaacaaattttatttttattccaaaattaattgtcctaaaaatagtacatttagccatgaaaaagagaaaacaagtaaacctatcaaaatgggacactgttaattaactaaacatagaaaatagattcattcattatccaccaaaaatttcaatgtacctgccaggtaaaagcaccatattcagtaccatgaaagtgataacgattccaataacagaacatcttccctcaaagaacttatcacatgtttatgtataagtttaaatgcattgaatgtcaaaaatgcagatagcgctttgatcaaggacattttagcaatgtattcagacaggatctttattttctagggttttcattataaggcagaaaggttagactaaagagtaatgttaaaaatacaaattatttttgtattctagacatttctataagaaatgtatggaaatagaactgtaattttggcagtttttgtcacagtgtcagtgagcaaatagatgtcatactcatgagtacagaaagaggacattctctttaacagccacatacttcttacccagaaacccttggagaagatttataaacccacatactcagaatatggtaatgaggaaatgctgtctgccctgggaaggggaagaggatctaaaacatttaggacaggtaattccacaaccatgccttaagataaatccatgccttgaaaagtaaaaagaacagcaaaaacagctagttagtcaaaggtcaagatagcaaaccctagctggtaaacttgtctgaatctttactgtattcctcaagctataaactatgtttatagactccttcaaacaggattaaattttggaggcattttcttaaaaaaatagtaaatccccactgtaaaattagttataggctttggacaggattcttgccaatggggctcagaggcttaagttttattaatttcacagtaactccaccttagttcacagatattttcaaaacatggaaagtgtgattgaagtcaggtaagtctaatcaaatatgagttctggtgccacagaacggtgatgttgaaatacttggcttttattggctatttatggcttttattggcatattaatgtcttttactgatgatctcaagttctgtctatagaaacactgatgtctgattgtaacagtttaatcaatgtataaaccaatctggatggttcagatctcaattccaacgtttcctttagaattcaggctcaatttatctaaattgggctcattatattattattaattttactttggctgtgggctgagttaaagcacactatgtttttgagcattctaagattgttccaggatttaaaaatttaagattactttggtttcttggaattatttaatacacactgcaattttccctgaaaaacacatgtaagctaaaatggctctatggaaatgttttatgttttaatgaggttgggaaacagagataaattcacctggtcataatcatatggtaaatattgatgaaaggaacctttttytaaactgcatagctataattctattccagctgattttgtagatttaaaatattttaccctgtttttgtgtctcttaaggagtttctgtttgggttatttgtacagatcaacagataaaaacttatgtcctagaacaaaaacagcacacttaaacacatcttttctttcaggccaaaaagtttgctgtttcaggaccatggacctccttaggaacatgtacatatttccctaatgaatccttaggctgtgatatgttttcgagttaaattgttattactgatagaaaagttctttatgtctgccataaatgtgcattaaagtttatatagcattcaccttcatgattggtgttttatcttactgattattttggcagagaacaaataccaaaagtctccccatgagaaataaaaacaaaccacgaccctctaaaaatagaaaaaaagccacaactcttcaggtcctccttggacccatggacaaggctcataaacctccttggtgtccattccatgttctgtgaatctggctgatggtcaaagaaagggctagagacaggatgatctacaaatagaggagattgaatttccaaatgaggtttgatcatctgctctttgtgaattttttccaattgcttccccatgtgccttggtttagcctttcaaaaaattagaattttatacccctaggatgtaaaataccatgtcagcgcactttttgtgcctggaatgcaccttggagatagccttgcccattgaccagctcttcatttttcagagggagaagaaagtgaggtctgggaaagtaaaatgcctgcccaaatccacagagctaagaagtagcagagcagagatcattaccacacattccaaactttcttcctatttatcatttttctccttgagccccttcttgtctgagacactacatcaattaaaattattttataactgcaacatcgtacaattgccatgtaacacattgcccaatgcaattcaatcttagcatctggaaacaatactcatttattaactcacactttgtaggtcagaagtctgagcacagcatagcaaagtcctgttcttagggtctcaccaggctgaaatcaaggtgttgaccgggccgtctcctaatctggagtgtggagtcctcttccaagtccattcaggttgttggcaggattaattcgttgtagctgtaggactgaagtctcttttcttgctagctgtcagccaggggcagctccaagctctcagacgctgccctcaggtcttagatgtgtggccctctcactatacgacagctacttcttcaaagccaataggagaatatttctcttcaggaaaggttcactccctttttaaggactctgctgatgaggtcagacccactcaagacaatctccctcttgattagctcaaagccaaccgactaacaactagtcaagagtggtatcccatcatagtcgtaattctcacttgtgctcaaaggggaggggatcatacagcatgtgtgtaccaggggacaggagtcttgggagtcatcttagaattctgtttgttgggccgagcgcggtggctcatgcctgtaatcccagcactttgggaggccgaggcaggtggatcacgagatcagaagatcgagaccatcctggctaacacggtgaaaccccttctctactaaaaaaatacaaaaaattagccgggtgtggtggtgggtgcctgtagtcccagctactcgggaggctgaggcagaagaatggtgtgtgcccttcgaccgaacttcgcgctcagcttacgtgccacactgccctccagcctgggcgatggagcaagactccgattcaaaaaaaaaaaaaaaaaaaaaaaaaatataccgtttgtcggccaagtgcaggttctcacgcctgtaatcccagcattttgggagaccagcctggccaacatggtgaaatcccatctctactaaaaatacaaaaattggccggatgtaatggcgcatgccaactactcgggaggctgaggcaggaaaattgcttgaacctgggaggtggaggttgcagtgatcccagatcgcgccactgcattccatcctcagtggcacagtgagactccatctcaaaaaaaaaaaaaaaaaaaaaaaaagaattctgtttgtcacgttggtctgattctactcattcaagtactagatttccttttgcctcctcttaccttctgctgccccccaactgagttggttcattgtcttccatcctacagaaatccagaaagggatgataagagaaggtaaattcagactagggtgacgaaaactccaaatccatgaacatatggcatttttattgggttcatgtattctttgcagctgtaagggcattggccagggataattcagaattaccttttcactaattactgaatagtaaaatttacctattctttgggcatgaagcttcttttaatacggctggcctggattcagagatgtctggggacacctgtgctgggttggcaggagcagcagcagctggaagtcaggggagagtggcaactaaagacctgccattttcttagtgcctatgcaggctgagactttactttcatgagctcatttaatcttcacaatggtgactgatacagtcaatattataatcctcattttacagatgaggaaatagcagagatgcagcagagtcagagttcaaagctcggtcagatacaccagtgctttttcaaggacaggcttctccttctcaggttttggttactcttgttttcttttttcttttttgagacagagtctcgctctgttgcccaggctggagtgcaggggcgagatctcagttcactgcaacctccgcctcctgggttcaagtgattctcctccctcagcctccggagtagctgggataacaagcacgcgccaccatgaccacctaatttttgtatttttagtagagacagggtttcatcatgttggtcaggctgggctggaactcctgacctcaagtgatccacctgcctcggcctcctaaaatgctgggattacaggtgtgagccactgcgctcagctgagacagtgaccctctgagggtctcagcatatttaggcagagattgggggatggcggagggagctactgagtgacaggcaccctctgagagggagcctatctcaagcaatcaaaaaatatcaactatatgtagggactctttctcccttcaagagttacaattaaacttttcagaaatcaagatcaaggctatagatgataaaaattttattcctaaaggaatttatagacaagaaattgattgaaccttataataccccatgatggttcatgagaaacacgtgttcatatgattataccatgtttttaaatatggggaaataaagcacagagtaggtgaatgtgaatttagggacatcaaaatgtaatgacaaaaatcagctaggcttgttcttgaatccctcaaactgtaacttttggctgaacaaatgaattaagatatagctaatacagctgcagagcttggaaaagttacagttgctttgttaaagtatattgagttggagtaaaaagttctatttggaaagatttcaaaacccttcaatggcagcccaatcattccgaagctgaattaaatgtaaattgtgaattatctgcatacgtttatagtctattcattttaatatacatacggtggttgtgtactttaagaagataaaaagatgattcctgaggcatcattactgcatggcagagagacaaacttgaaaacaagtaattataataatgcaagtgttaaactgaagatacagagaaggaatacacatattccacagtcactggttccctttgggaacatcaggaaaaaacagaagaggaaagttttgagttgggtctggaagaatggaactttagcaggcagaaaaggagaagaaaattccaagtggtaagaaaaacacagttaaaatcatagaggcaagaaaatataagaggctagaaaaccatagttcagtgtggccagggtgcccacaatgcacaggagaagatagaaaagagattgtttatgcagcaatgagattggaaaggacctggctgccctctaaggagaagtttctattttatagcagcaggaatctaatagagacgttacacgaaggaatgacaagataatcgctctattttagaagattaactctggtagcaggagctgggatggctgggggtgtgaactgaaactgacgctgcataagaagagaatttacaagcccagtcaaagaatgaggaagaggacccaggtcagggaagaagcaagacaggcgatgagaataaaggctgcttcagaggtgaacactgtagaattgggggcaccaggtggctggaggcaggtgagaagaaaaggaagatgtaaagagaaaaatgaaggatgatgcctagtttctgatcctgagctctgtctggctttttttgcggggaagagatggagattaatgaattgtctttgggcatgtttagtttcaggtacttggaaatacaggcttgcagtttagaaaacaacttacagctgtagataaacatttacgaattatcaacatttgaggtagtggcaagtaaatgatgtttttatagaattatcatgtagttaagaagaaaacagttttaaatattggaccatgggccagcatttaagagaaagttaaggaaaaaaaaaagatttaagaaaaagacacacagaaagtcatgccactgagattttactatgagtcccaggcaaaggttttaagatgagtgtatcaatgtcccctaggcataaaaaggattaaaaagagaagagttcagatgacaatttggaaggcactggtaaactttgagcagtttaattagattggtggagagttggagacgagacagagtccttgaactgataaacaaaaaaaatctgagagtatttggtagtgaaagtaaaggaagggtcaaaagaaaggttttgttgttgttgttgttgttgttatggtttcttcgatagaaaggggaaagataatggttaattggggtaacccagcagtagagattggcagggcaggtaaaccggcaggataaaggaaggagagtatggattagattttaataaaagtttcttagggaagaggggaagaaggaaaaaaaatgagttgagaaaatatatattaaattctttacattgtgcttctgagacagagctatatttagcacccataataaatatatctgataagaatcctagtatgttgctgactctcagcactctgcttattattatgaaaataaaaatgacttccatgtcattctgtcagactatcttttggaaaaaacaacgacaacaaaaataaaaatgtcattcaatccgaaagcaagagaaaagacaccttagtaaaagtaactttcttcttccacctacaaaaccagaacttgaagacacaaatctcaggtgtactgaaataatttttttgtgcctggatataactgctttatgggatcacagagacttcagtacacactctgggacaaacagattattcacaaatgatgatccaaacatattctaggcattcaattgaataaggcccaggatcacccccagaatttttctctgggcgccaaagaatcctacatgctgaataagaccctaggcaagaccagagctccctgcaccatttgaattaggtagtttccatcttgcacctatgggaaagagttggagccaacccaatctttatgattaggcaggaaaaacaacattttccataagaatgtaatcttctgcatggttggtcaccagttatttgttggacatccatttggtttctgccaagttagctaattgttctgctaaatcatctttaaaagatgacttgccttcttgagttgttaatacttgtgaaattcttttcccaaatgaatgagaattgaaagacatagattcttttaacacacacatacacaaaattcccaaacatatagtgtgttgaaagttagtctgttgcaaagaaacttgagttctaggcccggatccaggggtggagatgactgtaacattccaccaagaacttcactcttggctttcacctcgaaactaaaaatccctagttaagtcagatatatgaagtattgcactctaacatgaggaggaactgaagaaaagggaggatgttttcataaagatttagtgaggaagttagaaggaattatgtgtgaaagaaggaaaaagagtaattgtggtattattacaatacatgcctgggccaggtacagaatatgatgggtccgtgtttcactccatacagccctgttatcatgatgacattatgaagtaatttcctatatactataatctgttttggaaatgctttctaccaggtgtctcttatggaacatacaggaaaaaaaaaaaaagagttgacctattaaattactctcgctgttcaaatatttgaagtactaattcatcactcatgacattcaatttatattttaacatcattataaatttaacagggttgaatctttcaaaataacaaagaaagtgccttttgaaaggaaagaagataggaacgttgaagaggttcttgtgggatcactcttaaaagccatcaaagcatctgaatctctctcttggctgtataataaatattcacagaaaatgaccgccaagtatgtatggagaaatgccttggcatttgctgtatgaatatggatgatgggaatatagtaaaatattagagagattaaatcgaaactcaaagatagttctaaggtgtttactgggtgtcacttgatgaaatgactctatggggatttatcactaatctgtgaagtgaaaaataatcttaatgacgagaggaagcttacctacattatgcctaggacaagaagtttttaattcccctctaacaatgcagtgtttgcaggttttcatccattatcactttgttagagtatctttgctaaaacccaactattttataggctcctctgacacctcacaagaatccaagggaggaaatgaagccaatgaatgtaatctacaggtgaaatttgcagagcaaattcaggaaaaaaaagtaattatgcttcttcgcattttatcattttataacctcaccttttagagaaggtattgagagattatactgattagtccagatttttattttacatatttgttcatggaaaggcttattttaacagaagttatatcaaggtgtcatgcccagtaccatcatcatcatcatcaaaaatttgactgaataaacctaagtacacacacacttctgtatgtatagtcttacatatgaaagtaatatttattcattcaccaaaaagtgtaaagagaggttaaaacaggatgggatgaaacagtgtacaaaggtaaggaaaagcttttccaagcaactgaatttcccttgaagcctgaatgttaagtggaattaggcaaagtgtggtggttgtgggaaaattcaggcagaggatatagctagtgcaaaggctctaaggctgcaaaggatgcaagctatgcaggcatggtgcaaggaggcctttgtgcaggaagcaaagggagataaggctggggtgacccacagcctccttcttcaagggcactggatagactcctgggaagcaaaaagtgactggattaaatttgcatttcaaaaagactcttctgactacagtatgtggcaagataattgggtgaagcaatagtccaggtggaaagctttattacagtcaaaacaaaaaaggatgaagacttggattggggtggtacttagtgaagaggcataaaagaagactgaagtcaaaatgacaggacttggggatgggtgggccacagaaagaaggtgtcaaaatgattgtcacagtaggtaattagtcattgattgatagaaaatggtaatcactgaactaggctttttatcttcattctgttctatttaggttcattctatccaaagtatttagtgcttaccagatgcaaagtacagttaggaattctaatggatagaaatataaaataaatggatacaaggttatataatctctgccttttataggcttatattcaaatacagacaatgctttccatttccagtaaagggaatgagaaattatatacccagatacatatatattgacacacaaataaacagatgtatacacatgtatgtctacatatgtatatatgtatgtacacatatgcatatataagtatatatatatttgcatcatatacacatctaaattaagggtgcattgccaggggactgaggaggataaataatgcagaggtcagaaaaaataactgaaaagttgtgtgggatggtattcttcttataagaaattcaaatgttttcaaaaatgattgtcttatatatctgccttattacagaagaaatgtatgacgttggccctgtttatcagggccagaagaagaaattcagcaatagtatttagcagtattaacaattttaatccatgatatcagtcatgacactacaatcctgacagtaatcttattaatagtaatgataaataatagtaatcattagtatgtagtaatttttaaaagtcacacaagcagaaaaacataaacatagatttgattttaatgttgtttgaacattgccttttagcatttttctttgaattctaagctcataattttatcataaaactgtctttacagcagacaatgactaattagtaattctattaaatatttgccaaatggagggtaccacttctagttttgccagagtgtcttgctggtcagaagtgctttgcctaataaactcaacatgcatgttgatgctaagagtctaactgaacacacaggacaatcgcaaatctgtgaattattaagcctcctttcacctcaatttcctccctcataggatggtctttgcttatctcagttttgtgtgtattccttttgattgcttgttaatgtctcctatttatagtgatattatgtaacagtattatttaatctccaaaatagtatacaattgtcaagtaccattgctgtaattatggtgcagatgttggaatatgcttggaatcactaaaagtgaatttaccataagctaaggaagcttactcttcagggactctgacttgcaagagcctatttaatttcttattacctaaatttgtaagtttaattttgcagtatttttcttttaaaagatcccccaaattttatgagcttcatttccagaaaactcatctggccttgtttttcatattgtattgtcatatttaatttgtttttatgcctttctcacaatattttaggttcatgagatcagagacagtattttatttgtttctctactgcctagcttattatttatttatttatttatttatttatttatttatttatttattgttatgagacagggtctcactgtcacccaggctggagtgcagtggcacatttatggcttactgcagcctcaacctcccagggctcaggtgatcctcccacctcaacctcccagtagctgggactacaggggagcaccactacacctggctaatttttgtatctttttttttttttttttttttttttgtagagacaggatttcctcatgttgcccaggctggtcttgaactcctgggctcaagcaatccactcatctcagcctctgaaagtgtaagaattacaggcatgagccaccatgcccggcctgtctatcacttagttcagtaaatgcttggtgaatgaatgaatcatatacatttagtggttgttttgaagttgactctgctgagtgagattttctttgcattcatgcatcttcattaatgtcaactttgttgcagtttttaaaaaagtaatctttgtttacattatcttaagttacttgatttaaaaaagttaaaagtgactatttgcagaattctaaagtcccattactgtcaacatgcataatattttgccaaaaatgcaatttgtcttgttagtcttctttaatttttccatgttttaaaacttttcttggagtatttcccaaatgggatttactgagaggatatattcagccagctttgtagattctaagagtccttctaaaagttaagtctagccaaggaaaaatgtagtggcacacgattgcgtttctcttacgctgtcatttaatgtgagatctaaattttgcatttctttaatgcccaaggtgtttattttttaaaatctgtactctttttatcaggagttatgttgacaatttacctgggagctgatataccctatataatacatgatctaagacctgaacaatacacaaattaataaaattaaaccattaagatatgtcatcatttctaaattatacaattgggttttttttttaaagcaaaaatattcttcctcttttctccatcccttgttctggtcagttccaaggttttttacaaatgcaaaagaaattcatttgctactcctgaccacagagatgaataatttaaggacaatatcaaattcttgataaatctcataaatgttttaactgtccaagaaatggacatttatttggttaatcttttagctggccataaataatgtaataaaaccccttaaaattaacattaaataacataaagacctaacgatttttagaaaaaaacctttttggactgagccttgaatttcctgagaattcagctacaagtgataactaaaatgtaactcgagaatctggatatggttccagaaaggattgttgtcatgcaattgccatttcatcatctttccttaaagtcccttcaatatttatcattgcaatttttgtcctgtcttttcccctccatcacatcaaaccaaggaaaaacaattattaaatgctcatttatactcacctccctcccttcatattcattcattcctcagccctaaaattcctgtaggaatcctgcttttacgttttatcttaaagccaccatagtatctgtaatctcttttgtagtcatgtatgcttaattttggaagactgtcaactacctcttcaggttcattcaaatgaaaatgtatcacaaaatcgtaggctcttcccctatctcactgaaaaattactctaaaaatgaccagtaagctgttttgttgaagcaaaacatccagaccctaaacaaaagtagcagaattacaacatttccatagaaatggattttgagcttcttttttttaattggggaaaatcttattttttaaaaaagaatcccagaatacatctttgctttcagtccttcaattctaacataatgccatgttagagaatatgtggtagtgtatactaagcccttatgctgtctcacatccttgggacaaaatatctgttttgaaaggacttctctgaattttgctatttcctgcttactgagcagtggccccctcctgggaaaacagagttatttcagccagtgttcagactccatcttgcatacgtctctgtggaatattaatagtgctactgagatatattcatcatcttttctctgcttttgctgtctttatagcccagtgaaatttatatttggtgtttgtaggaaggctatcagaagctacttggacatcaaacttttaaactataaataatgatggcaagactgctaggatatctttccacagttaaacccattcaacagagtttcgttcttatgacagtgcaaattaaactagaataaaattagtgtgattttaggacagttttaaagtgaacatatttccctccctcccttcccatctacatatcaaggagacactccagactgcacttttatttaaattgcggccatcagaaaataccgtgagaaggtagtgtgtaggtaatggttcagttagcattgaccccagaaaatggaaaaccaagagcaagtcacttttaaagtgaagcaatagattttgaatatggattgttccaactcaccacttcccgaccacaacacaagagtatttcactgtaaattaagagtctaagttaaccacagctgtggtataactctgagaatgttttctctacatgtagacaattctggatccttccgtggtgcccgttaccctggtctttaacttttgtcctttgcaggggaggggtcaatgccttcttatttccttgctctttagaattctccaccagagggaggacaagggaaggagtaggtttcacgcgcagttctgagtaaagtttgaatctgagaaaccccacattcacgaattaaggatctccagttctgtgtctttattctacccctccctgcctgcttttccactcggcagaactgagtgactttcagcggctgcagtaattttaattattctgagtcgtgctccgaactatgttttttatcagttcctctgaaaattaagttgtagtaagagacgtagtttaagggcacccccttagaagaggccaggttattttttaaggaaaagctgaagatttctaacaggcacttactaaacacacacacacacacacacacacacacacacacacgcacacggcgcagacccagcaggagagcgcaacctagcatctttaaggttcgcttagcccttcctgtgcacctggaaggaagccttatcttaaactcccttccacctagagtttattttcgcctgcgtgcgacagggcttttgtacttaagtgagttaaggaatgaaccccgaactcttctgggaaagccaccaacgttccccccgcacccctcccagggttcctgaccacggagactctgcttggggcacaggtgtgggagtcgcaaacttttctctgcgccgtccttttccgcgtggaatgggacggagcagccctcccaggcgctgcctggctgcggaggggagcgggcagcgagagcctcgggtctccgcctgggttcccgggtctccggggcgctggcctcggtctccgcgcagcgtccagcgacccctgtcgggggttcccggcagccgcgccgccaccccccgcccggccagcgcgggaggaaaaggggctgcgcccgggagcgccgagcccaggctcctcccggtggcgtgtccgcgcctcggggtgggggtgtggtggggaagagggagggggcgaggccaggggagggtgcgaaggaggcgcctgcctccaacctgcgggcgggaggtgggtggctgcggggcaattgaaaaagagccggcgaggagttccccgaaacttgttggaactccgggctcgcgcggaggccaggagctgagcggcggcggctgccggacgatgggagcgtgagcaggacggtgataacctctccccgatcgggttgcgagggcgccgggcagaggccaggacgcgagccgccagcggtgggacccatcgacgacttcccggggcgacaggagcagccccgagagccagggcgagcgcccgttccaggtggccggaccgcccgccgcgtccgcgccgcgctccctgcaggcaacgggagacgcccccgcgcagcgcgagcgcctcagcgcggccgctcgctctccccctcgagggacaaacttttcccaaacccgatccgagcccttggaccaaactcgcctgcgccgagagccgtccgcgtagagcgctccgtctccggcgagatgtccgagcgcaaagaaggcagaggcaaagggaagggcaagaagaaggagcgaggctccggcaagaagccggagtccgcggcgggcagccagagcccaggtgggtgcgcagcgcggcccgggccccacgatcctcctcctgctcctcctactcctcctcctcctcggatgccgtggcctctccctccccctctccctcgcccgtcctcttcgccctgcgctctgagcgcccgttgagtcgcgcggtgcttcccctcctgggggccgccgctcacctgggcgccgagtcctaccgggcgcctacgcccagagctcagggcaagggacagcagtcccggccgcaccctcccagagtcccgggagcgcttcgctccctggcacggcccctccccagcgccttagcggctgagcccagcccgggagtgggacctgggctataggagtcgaggctgcgtgcgcgcgtgccccgcgccataagcgctttgcacgggggccgtgtgccctctagcgggaaacgctggaatgggccgcctggagggagagccggtcccctcggtgtgcctggcagcgcagaagtgggtggtcgagcaagaggccgcgtgggaagttagcttcggcgttttggggcacagggcaagcgatgtagagtgcgcgccggttcatcttgattcagtcctgtgctacggagactcaagagcagcggcagggattcctaaaggtcagcgaagcagatgaaatctagtccagtgtcaggaatcagctctgccccaaacaagttctacaaacttttggcttaacagttctatttttcaagacctctgtgataaatatggataatttactttcccaagagatgtaagaaaacaaccgtttatctgaatttttgaacccaattgtttgctggttatctatataataaaatggcaattgaagctttctagaaacaaatcttgtatttcatcatcagaacacgagcatgaacaaaagctttaccttagatgtccctaggaagcgctgatgctttggacattaccttggacaaaagaggcatgtcgaataaatacttgtttatgagtgattggtaggtagctgataaaagaggggaggaaggagatgggggagaatttattttttgcctctgcaattcccaattattaattgatccagatgccttaagtcgcttcgagcgtacccccaacacacatttcatgaagcacttctgcagaattaattcactagtacttgataatactgtggctacagtaatactgtagaagtatttgtcccttgctggaagaaaacaaaccacatttgcttggtcttcttactggtatcactgatagcatttcagaacctgggttattggcagagaccttcagcagagttttgagcaaaacagaaattgaacagagagtaattgtttcaccactggccattcttgtgcttgcttctttaataagatcctgctgatcatattcacttcaattactgatcattgcccctcatgagggtgtattgaattttcccttatttttaccctatattttggggagagaccatagcactttattcaacaagataggaaattggggagctggattagttacctccctgcgtgactttgtctactgtcctttctaaggtcatcatagtacattacggagatttcagacctagctcaaatcgttgtaaagagttattttgggggctcttatcactgtttgtggttgtgttctcctgtctccctgctcattggcttcagaagaagtttctgtggtcctctgtagatggtctaatgaattaagaaggggccagcggtctgaagtagcatcctgttcaggtaataggtgtgcattttgtcaagggctcccagcagcagtaccgtaacacagcaacttgacaagttcagtgggggaggggcaggcatttctgtgccctccagatctcatctactaggtaggcagctgtcttgtgattagctacgctctcttgacacagagcaccagagcttccttggtggctctcatctgctttccagtggtacagcagtgattccctgtaaaccagctaagtcagtatctttaagtgacatttgcttaactgtcttccctgaaaaattggggtgaatttggctgtaggttagtttttagtatatttgtctctgttttccaccagattataatcttttttggggagggactttttacccccttcgaagcatcttgtgctttttaaaccagataagaatatgtattctttatttgattcagaaagaatggtcaacaacttgaaaccagctttatatagaagcacatggcattaaatacaatgcttcagaatcagtgtttctttccttctttgtcattttccttataatggtaagtgccagtgtagttttccttgtcttaggagaattcatacctgatgactataatggtttgtgagaaaaacccacactctaggtttcaggcattcccaaaggaacgacctatagatgccataactctagtattcacacttgccgtgccagcccaaattaggacttaggaggacaagtttctcttgtattgctcccatcttagtgcctgtcagttccaagtttcactcctttcttaaaacagccactgcaactgtctgtccttgatgatatgtatgcaatagccaagcctctcttcagctgttttaacattgcctcatgacagtcaggggagagataatggggtgggatctcagccactcagccccgctgtgtgctatattgtacgcataggcataaacacatctgttggagggaaattttcagggggaaaaggcttctttaactttcatatggcatgagtgactgatatgcgatacatacatggctatttcagagcatctgcacttttatacaattaactaaatgttgaattgcacactattggggctgcagatgttcaacacaattatctattccataataatagctctaataggtcccaagcccttggagtcattgattccttttctttgctcaaaataagcaagctaagaatagtcttgggtgctgtatcactgatccacgtaccaagagccctgtaacagcctgggtctccttggtgctggacctcccatatccagcctcttcatactgattcagctcaacagactttttctcttgaagcctgaattacaaaaccagagcttttttttttttttttttttgacggagtctcgctctgtcgccaggctggagtgcagtgggtgcaatctcggctcactgcaacctctgcctcctgggttcaagtgattcccctgcctcagacttttgagtagctgggactacaggtgtgcgccaccatgcccagctaatttttgtatttttagtagagacagggtttcaccatgttggccaggatggtgtcgatctcttgacctcgcaatccacatgcctcggcctcccaaagtgctgggattacgggcatgagccacggcgcttggccgctttttttttttttttttttaatttttggccaattggtatttgactctaagcttcctttgtgattctctgtcgatatgttgttcttactctgcacctctgcacggaattctgtcttttttctttttcctcttaaataacctgggaaaaattcactatcatgcctagccagattctagaactatcctgtctcccttcactcctggtaggaggggcatttgtgagtctgggtgatggaaacattgagaaacctagtatcccaaataggtagaagcaggctgtgtgtttccccaatgacatcacccacctgtttccctcactaagtggctctgcaggctgaagtgcttgtaaacattcttgcgtataaagtaccctgaccctaacggggcagcctgtgtttacagaacaagaggaatgtccagtgatctgtttcaacctggttacttgtaaccacctagcctatgtaattattaaaaacattaaagattattcacagaatgaaataggacttattttgcagaattaaaatagcaggaagagcggaagaaagttgtatattcagacatgaatacttctcatacccatgaaatggtcagataacactaatgaaaaagaggagaaaaaatatatatagagaaccaaaaaatattagacaaacatgaacactgaatacctactacatgccaggcactgtgctggacacttttatgtttattaatgagggacctgctatttattgaattcttaccatgttccaggcagtaaaacagatgtatattgtgtattttgtcatccgtcctttcgaaaataagaaaattccttgctattaggcagcaagatgccagatggcctagtccttagctcttcagccagattgcctgggtttaaatcctaattaggctgttccttaaatatgtagtcatgggaaagttacttaatctttctgtgcctaaatttcctttttctgcaatatggggataataatactattattattatcatgagggtttcatgaagcttaaaggaaataatccatgaaaagcactctgaacatcaaccaacatgtaataagtgcccagtaatattagctgtctttataaaactacttaagaaatgaattatctgtgtctttgcaaagatatttgatataatttccaaaatttaccttttatggtaaaaaatatccaaagctgacctcagattacagtggttataaatattaatatgtactacctgtaaaactagagaaaagtggataagagtgtcaaattccataactgcatatatacattatgaaaacagtactgaactcaatctaaatattgaaagtagagtgaggtgcaacataattttatctctggcagaaaaatgttgaggtttcaagctatgagaagattttgaaacatgactcttttttctggcaacacttaagagttgatgcttaaacctcactttattgtatagaatacataatcttctcttttgggactcgtataaattgcagcaattgaaaaacaaaagtgtgcaccaacctgcccctcactatctttttatcaagcataacagtatattgccagcaatgttcatagaattgagtgcaggtgtttctaaatataaacaaaataaggaatatattaaattcacatttctagttttttatttcctcctcagccttcctagaatggctataggtagtgtttaaagttctggaagtgtgatagattcttaccaaatcaatgttctgttagcattctccaagtaacaagttaaattggatttgaacagtactgatagtttatcatgttctgttaggatagatgaaaacaaaccaaatgccagtattttgggtgagtcactttatttgctcaaagacgcaaatgaatgaacttctggtagtttagttaaccctggagctccccctcttgacaaatagaaaaaacaaaaaaataaatcagatagtattagcttgaaaacggatttcttttacccagataaaaaatatgccactaaggtacatacaatgaagttttcttgaaggaactaatgatattttggatttctcctaattttgtgcatgtctgcacttgtgtgtgtccttgtgtatgttttaatgggttaaaaaaaaaagcgagctaccaaaataccaatagatgtcagtgtttgtcgctttagaaaaagtgaggtgttagaaaaaaagaagaaatggacagctttatttatttttggttttactaaacataaagctggctacttttcaacaattgactaataattcactgtatataaccctgtttacaaaagtacattttattaaggaaaatattccatgttctcatctttcttctaaatttttttaaaaaagcctctgcagtaaattcccaaaagaattcagaatgtaggcagaaaatatgttaattttttaaaattaggaaacaaaattatttgagaatgtcgttaacacattagatttcttttgcatttttaaactagaaattagatatgcactttcttatgttgccctgattatgactgataaagtgcatttttcagtccaagtcaagtgagatctgtggagttctgcctctacataagagcagagatgatcagaattctcttcattcttcctatgccccatgtcacctttttctggcctccagagggtgctccaggagcatcacactgctattccccaaagactgcttttttcttctctctctctctctttttttttttaagttactgcagtattctgggcaatctactggaagaacagagtcccgattccatacatgttagctgcctcaactggagtttgttttccagctggaccacatagccctaattcattaagtattctaaattagaatattttaaaacattattctgatgatgttgatgcagtggttagcttgcaaggggacatctgtcagattaattccctctaggaatttcccccaagagaatcaagcatctttaaataccttccaatcacgccttacaacagctccctcccactgaagtgcacatggtacccacaaagagatttagtgctatttaagagtttcactctggcattggaaaactataggtgaaagcatcaaagttggacaacagatctttactaacacatttgttttcatctcttcctatctctctgtttcctcaacccaggggcaacaaatgtttaggagccccactttgattgagtgcacatttttgaacacaggtttgagtgactaattcttgtggatcatgggctgattttatttatgtactttttttgagacggagtctcactgtgtcacccaggctggagtgcagtggtgccatctcgactcactgcaagctccgcctcccgggttcacgccattctcctgcctcagcctcccgagtagctgggactacaggcgcccaccaccacgcccggctgattttttgtatttctagtagagacggggtttcaccgtgttagccaggatggtctccatctcctgacctcgtgatccgcccgccttggcctcccaaagtgctgggattacaggcgtgagccaccgcgcccggcggggctgatattttaatatggtcacacaggccttgttatttatggtttacctgcttatgttaattccaccctgtacttgttatctttgacatgagttactctcaggatattactccccttccctttttaaagtgtaatattgttcccattgtttcttgctccaagaaatctgtcgttgatgggaatagtctttgactgccacagtgccccgaacctttcattccacagctttgatgggcagggagctgccttctctgggcagctgtggagttttactttcaatgatatgagagtcacagaatgttttattagattgaatcatatgaaattgtcagttttgtaggtcatacctggctgaatattgtccatgtcatacagtttaatatttggactttgaaaaagtaatttgactttacttattctttacatattctttaagtaataatgacaactttgaaaaagaattatgtacgtttttgataattaaataggattgaagtaatacataaaagaaatctgagctagggataattgaagcagtaacattttttacaaccaataaatcagctaaaatcatatccatattaaatgaatttagcataaaattagaatgacagagcaactagcattttcccttggtgagaaaagtagtaagtttccaccataaaatatgactcatttttatttgacctattagcagatagttgttattgcaccttatcttaaccaccattatttctacagagagattacagagcaatgagtaggaaatatggaagattgctgaataatcctggctttagttatggagtaatatgaaaaaaggaaaagaaaaccttttgttcactttcacagtactacatcaatgcaagctttttagtagttttaatgtatgaattttatcatcaggtgaaaatgcatctcattattagatggcctattttataaataaagttcaaatttcgatatagccagtttttaaaactgtatatgtttataactcatccctttgttgcatataatctcccaattttagagacttacattgcatttttaaaggatagcacagtctctttagcaatcccacagggaatctaaaaccagcctttacaaggagatgtcaaaattccaatttgcagtgatatttttgtcaaaacaagtaacgtgtgttattacgtatagtaagttaacacaatttttcatttgtgtatcaagtaggcattggtttttgttttttggtttttggttttttttgagactaagtcttgctctgtcacccaggctggagtgcagtggtgcgatctcagctcactgcaagctccccccactgggttcatgccattctcctgcctcagcctcccaagtagctgagactacaggcgcctgccaccacacccagctaatttttttcgtatttttagtagagacggtgtttcactgtgttagccaggatggtctcgatctcctgaccttgtgattaacccacctcggcctcccaaagtgctgggattacaggcatgagccactgcgcccagcaagtaggcattgtttttgtgtgtacgtatcaaatctgtttttatatcttttggtattttatctcttttctgccaacagggtgaaatggaagtacagtattgggattatgcacaacattttattgtttaaaattatagtattccttttccattctgttgtttcagttgtttaaaaataagtaacaaaagagaggggtctgtcttgaagcccatgagatggtagatctttagaaacagttataatagcagtcatattgaaactgattgtcatctatttctgggaaaaatattgaaggctggtatattgtccccagaaggattagatgaaatacagaaaatagattatgattataattttttttagtgaggtcaccttgctgtagagttggaaccttcccgggggattgctcatgcattatccattttgggaaagagtaatacttacaggcattatggaaatgagcgggtaggtttgtcaagaggaaaccaataatttgaatactgagttgaatggaaaatgaaatacatgattttccatatattaaattgaatagaaatgggagacttatgtcttgagggtttttcttttctttttttgaaacatgttgatgatattgtgtgttcccaagtgccctcaacctgacaggaaggagaaatgtcaatagaaatagttacttattatattttgatatttagaaaggaacagtggagttttaaatgttgtgcatatcatttatgccccatccaaaaggatagcgatccacttaaaagaaggcagaaaagacaaggaccgctatcgttctccaggaatcaacagaagctaagggagagcgtagagtatagtccctgtggcctctacggagtcatcgccttctcagactgaatccacacaaggccgccttgactgaaagagcctctacattggactgtgcatggcgtggggaaatgtgattacttgcaatatgctactgattacagaataaatattatgcattcggttttcactaaacttaaaaagcccagtgaaaaccccacttctgcatgtggtgaatgtggttatgctgtgtcaggtgaagacatgtttcagtgccttcgtttactttccattaagatatgctgatttccttctcccttatgaaatagaaaaggaaggacataaccatcctgctgctctgccctgagtgcaccagtataggaataaaactctgtaaacagagggtggtggcaaccatctaacagggacctgcatttggacctgtgtgtttgggagagccgcaaagtggctgtgcctctgatatcacaggactctatgaaagaggcaaccaaagaagacctgaggctcttcttgtcattttagatatgtgatttcataaagttactcttgaccttaatgcagatggccatttgggatttgtgtctgtgcatttcatccacagctggatggcatagttgctgagtaatcctgttgctctggagcaatgtaagttacagctgtggccaggcacgtggctcatgcctgtaatcccaacactttgggaagccaaagtgggagatctcttgaactcagggattcaagaccagcctgggcaacacaggagtcctcatctctactaaaaatccaaaaagttagccgggcaaggtggcatgtgcctgtggtccagctgttaaggagggtgagatgggaggatcacttgagcccaggaggttgaggctgtggtgggcaattatgatacaccactgcactccagtctaggtgacagtgtaagacttgtctcagcgaaaaaaaaaaaaaaaaaaaaagttaacaaccatatcaaaagaacaatttattcaccccccaaattgtcttggaattctcacattaatttacagagagaaataaccctttggaaaattcacaatgttttgctagtattagtatgtcatctcactctaaaatgtaaaaaaaaaaaaaaaaaatcactactcagaccttataagaatctggtttttgattatgaatacagcaattcttttttgaaaactcccttgacaaattaagccaatggtggacattctaataattgtcatattttatggtacatttgtaactaaaagcctcttctttgggtaatgactgatagtttcatggaagaagtcattctttttctggtcactctagaaaataagaaatgggaaatgattgtatgtgatatacatatgcatggttctaagtaccaaatttgcagattgcctgaaaatgttcttatgtactttttatggatacaggctttcttttcaattagattcaaaaagtatcaatacattattatactttaaattgactagagctaccttttaaatggtcagataggttttctttttaaagaattacttttgtgattactagccacctgaaatggtgtttcaaggccatgcatggtgcctcatacttgtattcccagcactttgaggggctgaggtgggagcatcgcttgagctcgagttcaagaccagcctgggcaacatggcaaaaatctgtctctacaaaaaaatacaaaaaaaaaaaagaaagaaaaagaaaaaccattagccaggcatggtgggatgcacctgtagtcccatctacttgggaggctgaggcagaaggatcacttgagctctcagaggttgcagtgagctggaatcgtgacaccacactccaggctgggtgacagagtgagaccctgtgtcaaaataaaataaaataagatataaatgaaatagtattttcaagacttggtataaatgcatagctgttaagctgtaaggacatcaataaatgttcataaataggtaactttctacattctatcaccttattttctataatacagaaaatatactttaaattattttatttatctgagtccttttattctttttgcttttttttttgtttgcaagaccaaagtcagagcaatttcaattctattttgagcattttattttggcactcatgtattttaattaaaaaaaataaataaaccattgtcctcagccagaagaattttctgctgagtggtcataaatgcagagtttagcatttcacatctctagaatgtaaaagccacaaagtcatatctgtcttttatgttgtcatatcaccaggtgccatcatggtgctgagaacatagtctttgtttttaagaatttattcagtaactgactgaatgaggaagtatggctagtttgcttaagacattgagttgtaggagttgatgggtagcagtttagttattatgctactgtcagttaataagaaagtatgagtgcaattcagcagtatcagtgatgcatggatttgttcctaaattgttatttttgtggttgaaatttgcactgtttattttgaagctctctgtgtaagtcataatcagtgcttaattattcagactaatgaattggaattagaggtttgctcagtccacaattcttgctaccattaaaatattttgttacatttgtttttgagtacatagaagcaactaagaaatggattaagatgctgcagttaatctttgtaaattactatggccattgcctggcacctaatgtttgctatgttaagagtttgttatatgaataaacgaccgctgttcctggtaggtaatgaaagtaatcttaaacaatattagtactgcctaaaaagtaaggtcttaaatataactacagtagtcctgagaaaaatcatagagtgttagaactgaaaaggttgtcttagaggtcatctgctcgaatctcatctttttagttgaggaaaaccacaaggtacaaacaacaagggcatcaatcctagcactagaacccagatctccagatttcagggtaaggattttaattattaccatgctatactttcagtctcaagatggcactatatatgaattcagcttcacttttatagtgctttgggtgttattatgcttccagataagagagatgtatttctgtgccattgaggaatagcttagagtacctatgattcataggaatttgaaggctgtaaatcaaccgaatctttatatctttttgttccttcttgcagtatcttgtacccaagtagcttcaataaattttgactgacaagatgaccataaaataagtagtcctaatgtcataacatggaaaaggagggtaatgggtgtgtgtgtgaatgtgaattagtatagtatagtaatgagctgcctcagcgctcttaaactttttttagcaccaatgcctttatgcaggaaactctgaaaacaagcaagagatctttgtgggctctctgtaaattatgtgcatgcaaaaaagcatcctcagtgcttgtcccttgacagctgctctgagaccactgagtcactcgcttgcatctgtgagccactgaccagtcactgattgcagtgacagtttatcactaacaacctgaattatctttgacccagagacccaggggtcaaaggcctcctagtccattattaaatttccagggcagtagttcagtttgcattaggggatttgtttatatttatttatttagggtttttggggggtggggggtggaggagcttgggggaatgagacctgcagttattttccccacattataagattatttagtcctttatttgtgggatttggcatcctaaaagaaaggaagactcaaagtattgtggttctggtctgggcctcacatgggtgtcctaaagatttctgggacccatttatgggaagaatgccactctacagattatagcagggaggagctttgccctcaggaagacacagatcctttgagggtggtagagactcctaaagtctgctgattcatacccagctggccccattaacaagagaattaaagagtggctagaaagggactgaagagttcactgggggcccatccaaaaagctgggggtacagacaactgctgattcccagccagtcatggattttattttgagacaggtctcgtttggtcgcccaggctggagtgcaatagtgtgatcatagctcactgtagcctgggactcctgggctctagtgatcctcccaccttaacctcccaagtagctgggactacaggcatataccaccatgctcggttattttttttttaattttgtagagatggggtcttgctatgctgcccaagctggtctagaacttctgggctcaaggagtccttccaccttggcctcccaaagtgctgggattataggcatgaaccactgtgcctggcttgccagtgatggattcaaagtcgcctctgggttgtaaccaggaagcatgcctgggccagactgagagggctgaaggatgacggcatggtttcagtgtgtgagtgtgcatgtatgtacgtgtgtgtgagaatgtgggtaagtgtgtgagcctgtaaaagtgtatcatgagtagctgtctcttgggaggagagggaatcaggaaccttggtcaaataacaccatgtactggcatggaaaggcactgttctgggcagcagtcaagaagacagaggaggactaactgtatatgatttgggcaatcatttaaagtatctgggatttatttccttgtctaataattagcaaggttgatgtagatgaggtataacaactttaggggtagaagaaagctatgattcaaagtcggcattttattagatcagtggtctctgatttggtgtgatgtgttcctggtatgttttcgcttagaacaaggttgtttaacccatggcccatgggcttcatgcatcctaggacagctttgaatgtggcccaacacaaatttgtaaactttcttaaaacattatgagcttttttgtgattattttttccagttcatcagctgtcattagtgttagtgtattttatatgtggcccaagataattcttcttccaatgtggcccagggaagccaaaatattggctcacttagagtctttagtagtgactatgtttttagaaagcctaaggtatttgaagaataatagtcacataaagtctaggcaaatagcaaatttgttttatgtaggaaacagcttatcttctatagaataacttttgatgggtgaaattgtagtgttaatttatcttagtgaacacctagaagatttgtttaggtatgtgaattgtttagtgaaaatgtagaagatggtaagtatatttgggaattactagtgcagaagccttttattaaattctcaatagaaactgggtactggttatgaattgtgatctctcagatacctttaacttagtcgtctctcatgagtatgtgatacaattgaagttgtgggatttaacctctgctgagcagcagaaagatatgaagcagtggaaaatacaggctaaacagagcctttcagaataatttttcctcagtggtttatgttcttcacattcagtttttattcttctccatccttaactttctatagctgatacttccattttggatataggctctgtttcatttccagaggtatctctttccctaaactcatcaagtactttttcaaccttgttgatcatcttaacagaagaatcgtaacattaagttgatttatgacaccatatctctgtagtaactctgaattgtcatcaagctattcattgaaaggatacctcttaaactttctattactaagatccccaaatgtatctattctcctctcgataaaatgagtattgtcttagacaagcagcagactgctttttaagtgaagtggattaagctgctgtgatcgtccctgtgaatgtgtatgataaatcattttgatggcctttttaaatcagagtcaccgagtcccacacagagaaacagagaatgctgtctgtcattattacaataataattaagcgttggctgataggatataaagtataaatcaaagatcttagaggaaatagatgaaagaaaagctttgtttctcaaaaacttaatctaaaagaagaaatattgagcaagcattgggtgcttcatgaatggcctaaaaatatatttaagtctatcacctggaggttcgttcatttattgccaggaaagaatcaatcccacttttttttctctttccctgtggctcaactccaggaaggtgttttaattgattggtgggaagattttaacacagacaaaacttataagctaagcatcattatttctagtacagtggcttcaccacattatagggtaataaagttaaaagctgccgattgtttcagaattattttcagaaatttacatcctctttattcctattaccttgagaaagagttcagagaatgggcttagtcagcatgcaattatggtattagataaagcatacagtttggtctaaaaccaagatgcagctagtctcatcagggtactttaatcaatcaagggttgttaagaaggtaggaatgtcagtctaacttcattcctttgaaggtgatcagcctttcttctctggaggctttgaagattttgtcctatggctgggcgtggtggctcacgcttataatcccagcactttgggaggctgaggcaggaggattacttgagctcaggagtttgaaaccagcctgggcaacatagaaaaacaccatcttcctctccccactaccaaaaaaaaaagttagccagttataatggtgcacatgtgtagtaccagctacttgggaggctgaggtgggaggattgctggagcccaggagtttgagggtacagtgaaccatgatcatatcactgcactgcagccagggtgacagagaaagacccagtctcaaaaaaaaattgttctccaacaaatcttttttgaagttatggcatttaaccctgcccaccattcccattcccctgtcagtttcactatcatgcattcctttttctttatcccactcaggaccattgggcttgtcaaacatataaattggctttcaggaaaattcttctccatatctcttaaaaatttcctgtatcccattctcttccctctttttggaattttctttttctataatttaaagatagagtcttgctgttttctaggctgctctcaaactcctgacctcaagcgatccttctactttggcctcccagtgttgggattataggtgtgaaccattatgcccggtctagaactttaactaaaagtacgttggaccttctttctctgaacactggttctttttacttccctcacgtttcccatcattttgtttcactctcccgctgtatctcttttgaagttatcttccccttcactcattgactcttcagctatgtgcggtctgctgccaaaaccatccatgaagtttttcatttcaaggactgttttcccccctaaacctagcagttttatttggtgccttttcaaaccttctatgttgtattttatattttcaaggtccctgtagatatttttcaggttgttatttatttcttttagcagagtaagcctagttgtttcataatttctgtgtggtaatttcagtttgtgttggttctcactctctatgccttggttccttctgtgcttgatggttggtctctgaccctgtgttggccattgctctgtaaaaattatctgtgtcattcctcaaggcatgggatagaagcacattcctgccgagaaggtaagtgttactgctgggtacttggaaacttaccgagttcgtggcttgaggttctgtggcctaccagcctgtgcacacctaggcatgtagaaacctgtcggtagactcagcttttccctctggctgaactcaggatcaagacaatgtgtctggccggacacggtggctcatgcctgtaatcccagcactttgggaggccaaggagacgggtggatcacctgaggtcaggagttcgtgaccagcctgaccaacatggcgaaaccccatctctactaaaaatacaaaaattagccgggcctggtggtgggtgccaataatcccagctacttgggaggctgaggcaagagaattgcttgaacctgggagggggaggttgcagtgagccgagatcacaccacttcactccagccacagaacatctcaaaaaaaaaaaaaaaaagacagcatgtctttagttctctggggctaaatgggtatgtttagatttggtgtagcttttttggggttctttactccttttggggtcccagcttaatgtgaagagggtctactctaagactccccacttcaggaagatcctggagcctctatccctttctccaggatgagcaaatgcacttgaagaaaaagtagttgctttgtccaggtattttgcgtctatctctaaggtttgagatttgccttagaatttgtccaaaaaatgatcttttttgtcaaattcttttaaggtgatgtttattatatttcattcagcacttttaattgtttccagccaggaggttcttgtgagaaacttaccttccaggaatggaagaggaatcattagtcattaaggagctaaaaatgttaggaaaatattaatgcttcagaaacaatttgttgatctgaagagtacctaagttagggattttcagaaagtagcattttgttttgttttgttttgttttgtttgagacatggtcttgctctgtggcccaggctgaaatgcagtggcgcgatctcagctcactacaacctccacaaacgattctgttgcctcagcctcctgagtagctgggattataagcaggcaccaccacacccggctaatttttgtatttttcgtagagacggggtttcaccatattggccaggctggtcttgaactcctggcctcaagtgcccacctcggcctcccaaagtgctgggattacaggcatgagccactgcacctggccagtagcattctttggatgaattgactctggttttgttagccttcagaatctaaggaagtttatatctggtcaattttgagaaagaagatctctaagaaatgcctcaagtggggaagggatggactttataaaccaaaatgtcaatgtgttaatcctaaatatctcaatgaaatggggcaaaatatggctaagaaaaatttgacaaggtgtaaatctcactgaatgcagttgctgtggttgctaccaagtttacaagagaagaaaccaggttttgccaatgcatcaaaaattagattaaaaaagaaatttctctggcctagtctgatgcttagccttcaagagtaaaatgatgtgttgttagatgacttgaccaaagtcccatagccaaggcagggagagtgttgcagcctggtggtccattatctgatgccactggatctatgtagatgagtttggaacttcactttctgccttgtctgggacgtaaaaactttgggtgcccctcacttcttttttatataaactgttgtgttttattgccctggcactcttaagttgctgtttcaccctagcagtgcctgcttcaagccatcaccaatgaaagtgcctttgaagtgtcttaaggcgtgtgcattgcctagacaaatagttggcagaagaggtcaacacaagcgtctttgctttggagtgtcaattgaagaaattgtttttccacttgaattggcagtgtgtgctcttactgctgttagagttctgggcagagaagtagatgtgataattatgaagggagaagggggaagaacagctgcagaatgcagggaagtgactggactccagtaatcatatttggcaggtcaagggtgagatttagcctgatgggatttggaccattccctgggctagaaagtagtgttaaaatcaactccaggtgtttccgttattcttaaggcctaagtattattaaagcagaaaataatatggttaggatatgaatgggaggggattggtcattcgctgcttgggaatcacttatttgcaatagagctcattctctcttgacagttgctcctacatgtctaaaatacaccataaatctcgaagtgctcgtttcaatattgaagtttcctccaagtgagctgttatcacttttgtcttcaagagaatgctaactcactgaatctctttgagctttttatgctttacactgtggattttggagtttgctttggtttttccactagttctttaagttaaatttaggtaaagaaatttaaaatcatcaggcttattcttaaaaactcaagtattatcaaatgatggatgatagagatatgctttgggaatatatccaagtacttcaaatgatagaagttagaacaccaggagacatttagtaagagattcttctgctgggtgaaatcaacatcaacatcacctggaaactcgtgggtagtgcaaatcccctggcctcaccccagagctcctggaatgaagctgtccgggatagggcccggcatcctgtgttttaataagctgtttgtgggattctaatgttcgccaaagttttaggatcatgcctgcagagaatcctgctcactatgaaagtttgcatgcctgagtaagtcaaaagagatctttgaaaatagtatctaggtttgagagacttgctgtgattgtataattttagcaaatgtgtcaaaacaaatttttacttgcaggcaatatcttgttagtacagagaaataaaacaaacaaacaaagattataaataagaacaaaagtaattcatccaagagccatgtgaaaatgaaaatccttgaaatggaaaaaaaaaaaaaagtttttcagactaccctgtggaagtagtaagttacattgaaaggccgaaatcagccaagatcattttttgttgttttgttttttgttttttgagacagcatctcgctctgtcactcaggctggagtgcagtggtacgattttgactcattgcaacctctgcctcccaaattcaagcaattctcctgcctcaggctcccaagtagctaagattacaggcgcacaccaccacacctggctaatttttgaattttttgcagagaggggttttgccatgttggccaggctggtcttgagctcttgacttcaactgatccgcccaccttggcctcccaaagtgctgggattacaggcatgagccaccgtgcctggccaggccaagatgattcttgaagtgtgtgtgctgtgcgtactgtgtgtgcatgtatacgtacatttctgatggttcactttagtgatactgtagttcagtttatctgggattgcctcagtagaaagctatactcttacttgtttaactttctgtctattttctcctttaaaaaagaaaagattatatagtagacttatacttggtatctgtctgaaaaaaattatatgaaaactgtctttattgccagggaagcacttgtactttcttttctcatttattcttttctgcactttaatattacagtttatttgcttctggctttctttcataatttatcagaaatacaggcttgtatagaaatcaccattttttaaataaaattttatttttattaaattattgtgagctcattgttttttaaaacaatcatacacaagtaaaacatttaccttgggggtgggcatcagttccttttcccatccgttttcatctctagttttctttcctaaaaacaagccctctcaacaattctagttaattctttttctgatagttatcttttttttttttttttttttgagatggagtcttgctctgtctcccaggctggagtgcagtggcgcgatcttggctcactgcaacctctgcctcctgggttcaaccagttctcctgcctcagcctcctgagtagctgggattacaggcacacaccatcacgcctggctaatttttgtatttttagtagagacgggatttttaccatgttggccaggctggtctcggactcctgacctcaggtgatccgcccaccttggcctcccaaagtgctgggattacaggcgtgagccactgctcctggcctctgatatttatctttatattttctatataacatgcatgttctgctgtttcttttttaaaaaccttttattttaggtcttataggaagcttgtgcattcatttattcaacacataattattaagtacctaatacattctgtacattgtgctaggttctggaaataaacagagaatagaacagacatgattcttatccatggagagcttatattctaaagatgctaggaagtacttttaaataaaactctgacttatatataaaaacttcagaaaagaaagggcctgcttttaaatattttttttggtgttgtccactacttgaacttcatcaagttcatcagaaaaaatttaaatggtatttctaaataagtggtttgctccactctatcattaagcttgttaagatgaataaaaatcagaatattttcaaatgtatgtaaatacatacattcagtgtatttcccagcttcagaaagtcctaatttctgaaagtccttgttatcaactcttgttttgaaaggaccctttctttaagataaagtgtcacatacattattttgtattgatacaaattattgatgattatggatattttaggtaatcaatactaagataattatgttaatatgaattatgattatagggtattggtaacagacaggagtgtaggtgaatgatatgaatttgcactgagtttgtcatgcccagaaagttaatctgagccaaatttctaaaaagtgccttccttattccatattatgtatgaaagaagagcatagtttatgtgtgaatatatgggcaacatgtatatagatgtccacatgaactgcgcctggttaggtcctagaaaagcctatggtgggaaaggtgggttaagaggattgaagttaggagtgaacttgttatagtcttcataaatatttttatagccagtaacataaaacaataaagacagtgctccaaattaaagatacagcaatgacatgacatctacatttgaaactagtaataatggatgccgggccctattactaatttctgcttagcattccttactcaccagaaatgttttaggatcttagttcctttgcagcttgggatgcttgtaaattcacttgttcttttataaataatgtgcatacaaggagattttcaacagcattttcttatcaaaggtctgggcctatagtcaaatagtcaatgccatcgtggttttacagcacccatgaggaggtgttgacgttcaggttttagcttcaggattttgacttgtgtcttcttcctgcttgggtcctgtctcttcccacctccccagctcagccttcatgtacgaattttagattcttttgccttcgtatcagccagcagaagctagttttttgttttgttttgtttttttcaaggcctaggtttccttttactcacatctttcttcaagctttatttgcaaacacctccattcctcttgccattacttttgcttcatgtctatttcaaaactctgtttcatctttttcttgttactaccaataggagtaaattgagtgacttgcaattaaggtacaacagaagcagaattttcaaagttactcaaaaggaataggtagaaaaattcccatggtaagacaactcagtaaataattacatacaggcagtgaccatatatgctcattttaagttacaaatatacacacatggccataaaaatagtcagagactgagctggaactcaatccgtaaactgattccaaaccccatgtaatttttatacacagtttattgctagctttttgtccttttatgttcacttttatgtcctatcttctctatattcctaagttgcccacattttaaaatctgcctgtcttctgactttttaccacaagtgtttttttctcatccacttttattattctcatttcctgttttcaaagaaacaattgcaacacattttagaaatgcttacgacataagtggcacactcctgaagtctttccaaaatctattttcctccatgtcttaatttttgaaatttatatacttagcttctttctgctaattcccacagaaaaactcagcacaattttataagcaatgtgaatgatcttagagccctcataggaataaattgcacagaatgttatcaatatatcataagtgaggtacaggattaattttctaagatatcatttaaaatttcttctattgttactatacacatttgatttattaagccaaaacttcattcctctaagaataataatcccgtcacagttctaatcctagcatagtgtcgtcttaactgcaatgtactatcctaactttcaattacatcttatttcagctttctttattatacagtagctaaaaatcattgatagttataaagaccataatgccataacctctcaaatttaaacaggatagaatattttatgttactaatacagcaacagaggcattttcctctgttgggtagatgcaattattcagattccaagtggttgagacattccataattatgtctctaattttacattctacaggcctcatttcctctgtctgataactgtcctcacccaagggtttctacaaagtcacagtttgggtgaatctgtcatctcattttttcaaagaaggaaatcatcatcaaataaaattatacacaccaaataaataaatatcaaataatatattaatctacaaatttgcgacatatttattttctgactttgaggttaatttcgccaccatttttcctaatctgtatatcctatccccacttgcaaacaatgttttgcctgaaccgagtaatggcaacatttatcgtaagtatatcttagcttcttctccttatctgaatggggttctagttcccttagcattctcagataacattctgaatattctactctgtatatccagtttgttcatagacctcaaaatgcagaccctgcatggattattcccattctgctgtctgtctttatgaaacctgccaatacttattgctagatgaaattctacagatgttccatgatgacttattgactcgataacagggatctgcaaacatttctgtagagacccaactctgcagttgtagcacaaaagtagccacagacaatttatgagcaaatgaatgcaagtgtgctccaataaaactttatttacaaaaacagatggtaggcaggatttggcttatgagccgtattttgctgacctctgctctataatattccttgaagagatactattatcccaatatcctgacataaaatatatatccttaccatttgctgtagcaatattcaatttttctttacctggcgttgcttatgttctccagccagttctgtcttttcattaggaatctgagttaggatttcttagaactatgtatttgggtaagtttatcaaaggcctttttatttttattttttattttattattattatactttaagttttagggtacatgtgcacaatgtgcaggtttgttacatatgtatacatgtgccgtgttggtgtgctgcacccattaactcgtcatttagcattaggtatatctcctaatgctatccctccccgctcctcccaccccacaacagtccccggtatgtgaaattccccttcctgtgcccatgtgttctcattgttcaattcccacctatgagtgagaacatgcagtgtttggttttttgtccttgcgatagtttgctgagaatgatgatttccagcttcatccatgtccctacaaaggacatgaactcatcattttttatggctgcatagtattccatggtgtgtatgtgccacattttcttaatccagtctatcattgttggacatttgggttggtgccaagtctttgctattgtgaatagtgctgcaataaacatacatgtgcgtgtgtctttatagcagcatgaccttttaaagatcttaggagcataatgctgtaacctctcaaatttaaacaggatagaagattttatacattactaatctggttgggtagatgcaattattcaaattccaagtgggtgagacattccgtaattatgtctctaattttacattctccaggcctcatttccctctctcatttcatcaggtcttcaaaaggcttttaataaacttacccaaatatataattctaagaaatctcaaattcagtgcttgatcagatcactgtgtggtatagtttgtatatttttccccacccaaatctcatgttgaattgtaatctccaatattgggggtggggtctggtaggaggtgactggatcatgggggtggatttctcatgaatggtttagcaccattccttggtgctgtcctcatgataatgactaagatctggtcattttaaagtgtgtggtctctctctctttctcttgcttgctcgctcctgctttcaccatgtgatgtcccccactactcctttgccttccgtcatgattgaaagctccctgaggcttcaccagaagcctggcagatgccagcatcaggcttcttgtaaagcctgtagaactgtgggccagttaaacctcttttcttgataaattacccagtctcagttattttttacagcaatgcaagaatggcctaacacaatgtgtaatctttgtttcatagagtttacactacagctttgccacctaactctcctatgttagtacatagaatttctgaaccttcaatcctgttcagaatgccagattgtgagagaatcagttatgcttcaaccttgaaagcatggagttctctgctttcagggaactccagatgactcaggaacagaagtaaaccctagacaaatctaaagccaaacatagaataaagctgaacagcagatcataaatcccattccttgctccctaggaatacctcttcttctaactccagcttcagatttttccccaggtttcacaattgacctttgtcttagtgtccatactggttggacatacccctctggcatagacattcatgataggcattgccattcttcatgatatgtcattcttggctacttcctctttttctaggatgcatgttttagctcacttcatgttcaattgccttgtggttggcctacttcttctttctcttctttcctacttttgtggttgctttatagttgactaattactagttcatcggctctgcttattgcctaatactataaaagttcccttcctggaagggttggggatgggaaagtgggggtgggtggtagtaaaattaactaaactttgtagtgggctggagatagggcatgagtaaaggaaaagttgtattttaggactgctcaactgcatggatatttatactttttaagacaagcaacattaacaaagtctggatcttaaagtagagatctacactggagataataatatccctgtgggcatttaatgctcatggttacctagaaaataagtataaagtaggaaattttgagagagtattcttgtaaagattaaatggtgacaccaatgtaaggcttgaatgttctaataagggtgaaacttggtctgggaatggcagttcttacaccttttataattcttaactgttattttttagatctggtcatttaaatctgaggacccagatatgctagtcttatagaaagcacaaatttaaaatgggttctttgtcttacatagctctaaagtttaggaaaaaagtatcttcaagcaaccttcataggaattctccaaaataaatgtgttcctgattaatatgtgttttattttttaaaatttatttttaattaatttttaaattgacaaaattgtatgtatttatggtatacaacgtgatgttttgaaatatgcatacactgtggaatggctaaagcaagctatttagcatacgtgtcatcatctcacataccatttgtttgtggtgaggacatttaaaatctactctcttagcaattttcaaataatgtaattattttaaatcagttgtttaaatattatgaaattactttcagcccttagagaatagtccatctcacatgacacataaaaatggaaggaggtgtctagctcaggagaaactttttggaatatttgattctctttccctcattttctcttctttttttgttttttaaaaaataatttttaaaccctgtattgactcctggctattattttgaatatgagtgctaacaatttgagccttgtagataactatcccaatgccaattgaaccataattttcatttgtctctttctacaagattctgaattttttcagaagtgaaattaagtctcaattccctataatttacccagggcaataaatcttaaacattttttcttaaaaaaacaaaacaaaacatttttactggaaagactttatggggtggacattaactctgtaaatgccatataacttttggagagggctgcccctggcacagtgtaatatttatgagaaagttgtgcccatactaaccacctgtatgagaatcgcctgcgatgcttttgtttaaaaggcagattcttttttccctatatttttctctttttaaaaaaataatttcgacttatattttatatttatatttatattattttaaaaaataatttcaacttatattttatattcaacctacgtatgcaagtttgtcatatgagtgatattgcgtggtgctgaggtttagggtacgaatgatcccatcacccagatactgagcatagtacccaatagttggtttttcaactcctgttccctccttccctccctgctctagtagtccccagtgtctgtttttgccatctttatgtctatgagtatttgatgtttagctcctacttataagtgagagcatggagtatttggttttctgttcctgcattaattcgcttaggataatggcctccagctgcatccctgttgctacacaggatgcagtttcattcctttttatggctacatgatattccacagtgtgtatatactacatttcctcaatgcagtccaccactgatgggcacctaggttgattccatgtaaaagagcatattgttaggcttttctctgaattactgaatcagagtctttcaatgggttccatgaatatttcatattcattttagtaaacttgctcaagtgacttatgtatacagttataggtttgggaacctctggcctggggaagttgtctgcaacaccactgacaggtccctgtcctgccacagacatttctgctgtaactccatgcttgcattttttgggaaaaacaaagcaagacaaaacaaaactcattttgcaaaatgacacacaaaataaagaggcttctggaaaaagtagggctaggtgaagagaattcaaaacttacgaaactataaactgaacaccaacaagaataacaatgaacctaataaaaaactagcatagttatggctctaacaacatttattctcaacaacttagttaaatcgttgtacccttaaaccttaacactttttttttttgtttttcgagaccttggttcttgaggacattttcttctagcagaaatcagtattaacttctttatccatctctctcttttttttaaactgttatgtaccatcattatagcacttcttacaaaaatgaggagctgtctttgtaacttcatctgtgccatcagcttttccagatagtttaacataaaaggaagatgaagtggttctggaagcaagaaaaccagccaccacttgcagtaaggaaggcaggtctatgggcctattagctcatggaggtttttgtttgcttgtttgtttgtttttgagatggagtctcacacagtcgcctggtctggagtgcagtggctccatctgagctcacggcaacctctccctcccaggttcaagcgattctctagcctcagcctcctgagtagctgggattacaggcacctgccaccacgcccggataattttttgtatttttagtagagacaagatttcagtatgttggccaggctggtctggaatgcctgacctcgtgatccacccgcctcagccttccaaagtgctgagatcacaggcatgagccaccgtgcccggccagatctttttaaataagatcttcatgtgttataatactaaggttgtctctttaatcacaaaaagccagtcctttattgcttcaaattgttcatgtgctgatatcatatgtctattgaggtctgacttactacattaacacacgctggcagaaccactgcagacattctctgtcctccttttttttttttgtcactaacatgataaaattcttaagggtttgaattctcagaggtactgtctgatggttaaatcacagaggtccactgcattgctgatagatttttttttcaccacagtgctgacaatacaattgttcaggaatggccttcatgaccataaggttggtttgacctaggttcttaattgtgatgtctctatagcttttaacttatttcaggatgatttcccccattgcaaatagataattgttcaatagatttgctgcagacttttggacctgatctatagttttcccttgggatatgtaagatatttgaggtacaccaaagtaatgcaagaaatatctttctttagagctagagtttagacaggaagtatgtcatagaactatggtgtgtccttcccaagtgagggatttcattagaccttgacttagaattgaatgtaatgttaatctgtaaaggcttgttgtgagggttttgcttaaatttttaggtttattaaatttttaggtttattaaaattcctaaatgatgatatttttatcagcaaagacaaaaatactgctacttaagtagtagtcactagaaaaataatttattttgttttgttaccttaactgtcagatttaagcacattcctaccaatatttgggtttgggctctgaaacccaaaacttttgaaagctttggaaaattttgtagaagttctttcttctgtcttttttttttttttttttttttgkatactattgccactgggatgcaagcattcataaattatgtttaaatataaaaattaggtcggtaactctctgctcgtggattcctgaaacacaatgtacaaaaacccagaatagatcttcgtggctcactttagagcgtaacagcactgggaggtgatctgacttttcattttacacgcaagaaactgaggctggagagaaagaagggttgtctgggtcacaactgttgaggtcagcctctgggattgaacttcatttcctgaattcctcatggttttccacctccattcctcagcttctgtgatccctttggtatggggctgtttcttgaaccttgaataggagggtatggaggtgaagtgacatgtgagctaattcttttacctcactctggtttatctatttttatgtactaaggtcctgtgtattaattaatgagatgagttccacagttgctaatattagaaaatcaacacaattgatttctccttgggaactgtattagttttctattgctcctgtaacaaattaccacaaactttgaggcttaaagcaacatgagttcatgaatttattatcttagagttttaaatgttagaattctgtgaggagtgtcactgggctaaaattgaagtgttggcagggctgcaggaggctctaggagagaaatcattttcttgcctttttcggcttctagaggggcttcccttcctcttacttccaagccaacaacatgacatctctgagtattcctctttaactgcaccaagggaagataatctccttttaaagattcacaccgttagattgggtgaacctggataatatagtcagcccttcctatgcatgagttttgtagctgctgataaggaggtcatctgtaagcaacttgaacatctatggattttggtatctgcaggggatcctggagccaatcccccacagttagtgaggaatgaccatatagcataatttccccatgttagtatccttaatctcaaggtctcaatcatatctgtgaagtcccttttgctgtgtaaggtaacatattcacaggttctggggatcaggatttaggatctttgggagccattattctgcctgctacaggaatgaatttgtttccacttgtctcaactctaagtgggcagttatttaaaaactttgtattaatttagagagcttcataaaatgctaaaattttctgagaacctaagtgataatataagaagaatagctaccaacatttgttgagtgcttgcaatgtgacacacactgactgctatgtgctttaattgcaatatcttatctaatcattttagtagccctatgagataggttctatttcatttacattttagaaaatgtaaaatgaggcttagagaatttaaataatttgtccaaggtcaaacaactagcatatgggagactaagacttgaaattgggtttgtctgacccaggcttttaatcagcatattgcactgtttatatgtagctctgaagtggtaaaattgtaacatagtgtaatgcagtactgagaatataatatcttagtaatttttaataaataagtgttttagtaaggaaaataagttgttattaggaataaacactttctaaatgacatagtacccattgagcagtgttcaactgattaatattagttggttatatactgatttagtgatcagttctcaaagcctcaatttaaatagaaaaggagttatgtggaatttaagtggaaaggatatagctactttaacaattttttgtgctctcagattgtaaagaggaaggatttattttacaaataaattgcttgtgaaagaaatttaattggttaataaagtctctatctcttgccccctaaccagaatgtcaactccaggagaacaaggatcttggttttcatactcaattctatatgtccagtacttaaaacagtgagagcaatgtaactgatgcacaatgatatttgttgaatcaatgggtactgacaaattcctaagggaataaagccagttatctacatgaataaggcaggatctagatactagctgcatgccagaagaagaatatagagcgttctaatgtgtttggctaggaacagaccatatcatgggctaatatgatagagtaataaaggtagtgataaccctgataaattcaatatgtttttacataaatcctgtgcattaaactagtagctcacttgatatggagtgtttgaatcacagattgactttgctcattcgttcttccattcagtcaacattattgagcactgtgctagttattaggataaaagatgcattaaaagaataaagcccctaacttccaggagcctctgtctcctaagtgaaacaaacatgtgtaaagataaaataccttatattaaatggaataataatggttttatagaaacatggaagagggatacttaacttattattcaaaagagacacttattcgaaagacataaattgagtttagtcatcttgagttttagaagaaataatttttgatttatggagggattgcaaatataggacagagagttctcctataccctttattcagctcgtttaataatacatagctttgctatattgatcaaaactaagaaattaacattggtacaatactattagctaaactgcagaccttacttggattgaaccatcttacagccttttgtgctaaagggaaattgtgtatgaaagtgctttgtaaacagtaggctaaatagtggtagtctaagaagtgccatctggtgagcccagggtaggtcactgagggtgaaagttgcattctctgaagggagctttaaataatctaaccatgaactctattttattttattttattttattttgttttgttttatttatttttgagacagggtcttgctctgtcacccagactggagtgcagtggcatggtttcagttcactgaagcctaaacctcctgggctcaagtgctctgcccatctcagcctccggagtagctgggaccataggcacatgccaccacacctgggtaatttttgtattttttgtaaagatgatgttttaccatgttgcccaggctggtctcaaactcctgggctcaagtgatctgcctacctcagcctcccaaagggctgggattacaggcgtgagacacggcgcccagcctgagctctctatattttagtttcctttaataacatgatcagttccacccatgaatttaattaattccttatgagtttgctattaaaataaaatgagcggttattgatgcttattgtgtgtgtgacagtatcctattcaaagtatgggatacagttctttgattctctcactccatcctgtggaaggtaaacttaccttgcagatgaggatgaagttcacctaggtaatagatggacttggccaagccatgagactttaggtgggaaaactggaatcagaacctgagccaacctgacttcaaagcccaagttttctcctttgtgttgtctcctgagtcattttcctgtatagccccgctgaataagcattttccaaattatattttgtattgtgcaaaacttcacttccttttttattcaaagactatgtatttcatgcttcaaggttttctgagaactgcagtattctgcaaattctcaaaaaatgcttttgctctttctaagatttcatgactttaaagaacagttactttcttcctggccttcctggtgtcagtctgtatgattctataatgtttagtgtattcctttatattggctgccctttcctttgagcatttcggtaacttttcttgatagtttccagctactttttttttctttttgtctctcaagaatgaccaaaagtatatgtagtttttcagatatttgtcatgtaatttcgtgccatctagatttatataacctaacattttctggctttttcttagatatttatagatggtggtggttaaatcagagttaataatattaatttttaaaatatgcaaaatgcttttattgctctttttaattaggtttttacaactgtattgaaataggtgtggcaggtgctatttcccctcctttttctgctcaagatgattgagattcagagtaattttgtgactgcttcatcctgcagaccaaacaagtactttacctaagtttcctgtctccattctttttgatagggtctatcaagcttgtggcaaaagctcaagatgttatgtgtagagttcagtaatttaaattcatggacttataaactattaacaaagaatctaattaaccttctttctaagtaaaaacaaacaaaacaaaagatacttctagtagagtgccagtgtctttagggattcatggggaattaattaaattcatggttggtactgatcatgttattaaaggaaattaaaatctagagagctcatggttaaattgtttaaagctcccttcagataatgcaaatttcaccatcaatgccctaccctgggctcacccagaaggcatttcttagactaccactatttagcctactgtttacaaagtactttcatacatgatctcattgttcagcacgaaaaaagctgtacacaagttggtgcaatccaagtaaggtctccagtgtagctaatagtagggtaaggaaaacgatatgttgacatgctaagtgagcttcattttgacttctttcgtgtaacatgtttgagtctttgtgctgagaaaattgtattacattctgggagtcagtgggttgtgtcagaatgtgtgggaagcagctcactttcactttcaaaagattctttaaggaatttatgctttttgtaaaataggggagactatttggactctttcttattgggatttctttttgtgtgttttatgagaccaaagggcactgacttccatcatacggtttgactttggaggacagtacgggaaagtgcagcagccttgtagttatagtggccacagaatgtagtcacagaataatgtagcaccaggtttcttactgtcaacaatctgtttaatttgattttggttattttccacctcttcagcaaattcatgtcactgggaaccctaagataaggaatttgccttccctgatcttcctgtggggtagaagtaaaatgataagaattcaatcgttaggttgtccatggacctgcttaagagtgcaaggaggttttaaaggtccttagaaagtcaaatgtggaccctgctgaagaagggatgcagcgttgcttacttaaaactgtagtgaacagagaagagagaaatttaactttgatattgtaggcctcaacgagtaaagaaggctttcaatcctggcaggtactaaggttttagtatcattctctttaataagtcatctgtggacaaaaatgaaaaaatcagaaagccataattactaagaaaggagatctgactaaataacaaagaaacagattttagaagtcctgaaaggacacatttgtttcagaattagctctgctaaaatttttctttttcacagaaggaataagctttaaatggctatgtgaaaaatagattatagggaactaatgttcttagatcatgaatcagggactttgttcatttatatgcactgcttaaaagttttcacatagttatcattgtttaaaactaattataatcaattgctaactcatcttacctgggaatttatttagtttagaacatgtaagtaaatttctttaaataaaaaagagaattttagtggcatgaattaaatgtaattcaacttgagcaaagaagaaatggttataaagacaaatattaacatatcaaaatcatgttaatgtgctaactttacctaagcaataaacacatcagaacagaaaaaaacttgacaataagaaaataagtaaatatatttttaatttttagtaactagatgtttctcagtttttctgtttaacattttggaagtgaatatggctggtatgtataatgcataagaaaaaaatcctgttttatgacaatggaaaaaatcatatttataagcttatgtcatgtgaactttgctacacatcaattaggtaaaactgtactggatccattttaaccctgtgagttgattgctttcagtgaagcttgctggacatctttatgtccgagagtgagatgttcttataattaggggcagctgtggtgacagaatcaattaggcaggcctgctgaacacttaccttccagctgctggccgcggcgcagtgatttgctccagcattcattgtcacggtgtattgcctttacacctcgaaagaacaacattaatccattaagccacttttgttgctgtatcctcacgtgggggttatcacatcgcagtgaacacaggagtgagatacagcactgttcacccttgtggcatttggcatatgacagatagacagctgcatagttcaaaagaattattttaacaccaatcgcaagtattgccttgttttatttccccatcaattatccaagtagctcagaaaattcagcaattttgcatatctactgtatttctcagactgtcttttgcacgtggaataagtgcagaaataatgtcatgtggtgtatcccaggttttgtgaggaaaatatggaccctattgatagatcattaaataaaatctttagcacattgtctggtagttaagagccagggctctggagtcaaacttcctgggttcagatactgacttgatagtataccagccgtgtgactatagacaggttactttacctctctgtttctgtttcttcatctgtaagttggtgataatggcagtaatacatatctcctggagttatcataaaacttaaaaacgttaatgagcataaagctcttagaacaatgcctggcacatagtaggtactcaagtatcagctattattattcaaaggtgtttattgttgaaagtactatatatatatatatatatatatataatgtgtatatgtatacattacattctactatatatactatatataaatatactgtaaataaaaaggactttatttaacttcatctcataggctttggaaatacattatagttgttttaagatttttatctttagtccctaactgtgaagtacagggcaaggaactgtatagaaaagagagattgctaatttcaataaataactaatttcaattatcagggtgaaaaattatctcacctaataaacctgcattcattttcccttgtagaattttacagtattgtaaatttctcacagacaaatgtggagaggtgatttggtttacatagctcattataagaacaaaaaatttactgtagtggctatgaaatggagtgatctttcccagatttttaatctactgtccttctctccattttctgcctccacttcaaactttgtagaaaaactaggtatggtaaaaagtcctaggtttaagttttggttctgcaacttgttagacttacgacattaagttcccctatcagtttccatctcctcacctgtaaatggaaacaatcattaggtaccttacatgaaatacacaccagaactgttgcagatgaaaggagatttgaccaaatagtaattttgcggatatgtagtgacaacaaggcacattaacagttaagggagcaaaccagcatcttgtagaccatggtcaatcaatggagaagagcaactttgacttgagggcataggaggtatggtggctgacacttataatcccagcactttgggaggctagagcaagaggattccttgaagaggattgcttgaagtgtttgagaccagcctgggcaacatgaatctctgtatacaacaaaacaaaaagcccagcgtggtggtgtgtgcctgtgcctgtggtcccagctatgtgagaggctaaggcaggaggatcacttgagcttaagattctgaggctgcagtaagctgtgatcacataacaccactgcattctagcctgggtgacagagtgagactctgccgccaaaaaaaaaaaattaaagcagagaaggtaatgtgcttttcttgcaataatacaagaaccgtctgaccactctgggtagactctgaaattaggtgaaataaatgagctagcaaggaacatgaccagggtctcggctgaggcagggtccagtttgagagtcctccaacagtgatggccagataagagaaatacagaacatgaaaacttcaaagtaaagataatacgacttacttgacaattttccagttagatttacatgtcatttttgttagtgtctgatggcagagcggcataagagtcctagcccagtggcatgcagaacacaaacaatgtcacagggcctcacgattccaaataataaaaagtcatagagaagatagatggggcctctggaatcattttgtacctgggtttcttctttgtcagcatcttccagattcttcctcatcctttcagcagacacttgaagtcctactttgggttaggagagcctgagatcctgtatatcttccattcaataaattcagaaattttgatgtttaggtatagtatcaatccaaatggacacatacacagtcaggaaatagcctaaccctccaaatagagactgtgaccccctgctattaacttgctgacccttgtttgatttcgtagggataaattccttgaatggccctctgtttgtacatgtgggtttttttgttttgttttgttttgttttgttttgttttttgagacggactcttgccctgtcacccaggctggagtgcagtggtgtgcccactgcaatctctgcctccccagttcaaatgattctcgtgcctcggcctccctagtaactgggattacagatgtgtgccacaatgcttggctaatttttgtatttttagtagagatggcgtttcaccatgttggtcaggctggccttgaactcttgatctcaagtgatccatctgcctcggcctcccaaagagctgggattgcaggtatgagccaccagcgcccagccctctacatgttttttaagtgcagtcagttgagtatggttttcagatggagaatctgattaatcatcttcaatggccttagcataagcattctatttaactgagctgattgtggctcataccctcaaatcaaatatcttaaagaatcatactgtttcagtcatcgtgtagcagttaattgtgagaagtgaaacttggaggacatccgtatgtaaaatcccccaccaaaggaaaccaatatgtttgggaaatcaaaatgaagcactagtaagaagccaactctggctgtagtggcaccactgtgatgagtgttagcataaaatgctgaaatactgcccccaattttattcttttatgttgtataatgaaacgttctatgcatgttatgtgcttgcaaagaaattattcagtagttcatatacacatcgttggattacataaggagctggacatggaactgctagaatggaatttccagagtccagccatcttaaccctactttgaagcctattcccagtgtgtttgctggttggatttagtttgctgccagtggtaaagagagtcagcttgagaatatattataacaaaatactgaattttatggcaacttttatttcaaatgaaggtgccatcctccttcctcagtagtcagggacaaatagcagctccattccagctcacagggaaccctatttaacttgaatcaagaacattctgtctaagcctgattcagctagagcacagggcggggtgagcacaacatcaccacaggtggcaacaaataatgatcttgttgggcgattcgggatataacccaacatcacccactgcgtcagtagcagggcattaaaacctagctgcattccgaaataccattaccactagaatgtgctgccttttacacagctatatttacacatttgataagacaaactttcccttttatagccaaatttgtgagtgcagctcagaagagaagaccagatggaagagcacaaagtttatccactctgttgcaggactgtaatcaacttcgtgagatagtacaaggagagagaaatatgactgggggagttttggagactctccatagtaatttatctacttctaacatgactattaacaaaaggacatcctgcatagaggactgattaatggtattcgtgtggctttcattagctaacataattgtcagtcaccggttgtcactgtgggatctgcacatatgtgatggtgggctttttacacatttatgcagggaagacttagctgggatcatagctgaaagctcattgttacttgataacattttgcaggtttcctgtgtaatttgttcaatgtgttgaggctcttcagattagctgcacaaacgtggagagtaaagatatgagctagctttgcattgtcagatccttcagagaccagaaataacaacttacctagtgtcacatgccatcagcatatctctgcagcagacacatgctaaaatttgtttcctgttcttaacaatacagtacaatattcgatatagctgcacgaataatatttgaaaaataagggcacagtagatgatcaaaacaagaggattgcttagatgaatgaggttgtttttttggaaatttattttgcccttaccacaagtattttttcacccattaaattattagaataaatgaacatgttgcattgagtttttgtggtggtcagaatatgaaatataagtatttttggattacaaccacatttttcttccctaaattgtgtgacatagcaaataggaaaagcagaacacaaaagtagactttggaagtatactttgcatacctgcatgttttgagttagagtcagaggagtatatttgtgatcttttaagatatttgaaaacacttaaagcctgtaaagagaagtattcaaaagaagctcctgtgaaatgtgtggcattgctctgaaagcatttgcatgtctgttttaaaaggctgttctttgcactggactgtctgcctctgttgatgcatttctaaggatgtggatatgtttatattaatgtcaagcaagtttgaaatagatttaggcacagactgcttaaaacttgctctgttattaaattgtttcagggtgtggaactaccgcctctctagaaacacatagagagcaaaattatgaactgcggtagaccaaatacaattaaatcatgcttaagattctcggaacacctcctgcatttgaagcattaacttagccttgagcttgccttcaactaatttttaattaacagaccttttatgcttagataagactttcaagacaagtaaaaatttttttgcacttttaaaattcgagtacttacttaacaagaattgaccctaagtttaggaactaccattggccttataaagttattcctgggtattagaagatacttggtgaataggttttatttcagtgaaataaatgatattgtttcatgtgagtaaaccatatgcctgagaaacacgtgtacattgaaaatgaattctattaacagatagctatttatataatctctgacaaaaagaaaatttactctgttgaaaattgactcattatggatagatgaaaaaaagtcatacaaaccacatgggctcaaatattagtttgcacttttataagaatctgtgaaatattcagggctattccagtagtcctggaagacaaaaagtttgaaaaaatatccataaagacaaaaaaaggtttaaaatttttgccctgtgtccttgatacttgaatttgagctctgccctgagtgagcgagaacctttgtatggtccttgtctagaaggtaccactgacggcagaacatccataagtcaaggatgcaattgtgcagctctgttggtagtacacagatgtgtttcttcacttacgctatggaggattttgagttatcaacttaagagagctgttttctgaaaagctggatatcctcatgtcatagaagttaccccagaaggacgcagcagggacattattacacctggacttctagggatgcaaagttagagtagctgtgagcttttccacatctgatgattttggaactatgtgcaagagagagaaattcaggctggtcactagaggtatccttgaaccgcaaacatcgagaaatgttcatacatcagggtcagcttaagaggggatattttagctaagaaggaccttggatctgaaggtctctgcctcattgcattgtagatcatctcgtaaggcaaggaatgtaccactctgcatatggaccccaaaaggaaaggagaagtgttgacctgcccaatgagtgattggtttccttccatcaaaagaccatagtggggttggggccctgaagtcacgattgtgaggatgaaccatgagcatttcagtgcaataccgcttgcagaatttaaatgatttaaatgaatgtaatgttattattaattaaatttaacttataaattattaactcaaatatttacaagaatttctttcatgaatgcaaattaaccaagagtttaaaaatacttaatgacatgaacataaagaagaaacctccttgagagcggagggtgagaagaacgtgacgattgaaaaactgccagttgggtactatgcttattacttggacgatgaaatcatctgtgcagcaaacccctgcaacactcaatttacccatataaaaatctgcacatgtaccccctgcacctaatataaaagttaaaaagaaaaaaaagaaaaaagaacagactaatgcacacacgcacacacagacacacatacacacgtgcgtatttaatgaagcctaggtcttttatctaatggcagaaagatcagatgagaaaggcagaaaatcagagacagaccaaggctcccggtttttttttttttcctctgtatgtgttagcatgtatatgtgtaaatgtatttctgtttgctaaaccatctaaagtttagttgaagacatcatgacatttcacccctaaatgcttaagcagatattgtctaagaacaaggagattcctttgcgtaaccacaacgcagtgctcctgcttgagaaatttaactttgatacaatatttttattcagatttccccagtagtcccaataatatcctatacagctctttttcccttggagcaggatccaatcagtagctccacattagattgacttgccatgtctctttaatctcctttaatctagatcacatttacagtcttcttttgttattgatgacattgattttaaagcctacttcagttgttttatagaatatctctcattttgaatttgtcgtattgtttcctcatgtttgaaatcaaaacccctaatacagaaataaataaactaatgaagacagaaggtgaagaggaaggagagacgagctagagagagaaaagaaggaaagagaggggcaaactgattttatgataaaatgtttatcaaaggggaagaaaacaaagtctccatagatttatgctcagactatattgataagcaaatatatggagtggtaaggggggaaacatggtccttaaagagaaggtatctgaagtatagttgacactcagacaatgtaggcattaggggtgccaatcccctgtgtggccaaaaatttaagtataacttttgactccccccaaacctaactactaatagcagcctactgttgactggaagtcttatcgatcacacaaacagttgattaataaatatttttaacttatatgtattatatatggtattcttataatacagtaacataaagaaaatattacaaggaagagaaaatatatttattcatcaggtgaaagtggatcattataaaggtcttcatccttgtcatcttcatgttgagtaggctgaggaggaagaggaagaggcgggcattggtcttgctgtctcaggggcagcagagacagaagaaaattcatgtataaggcattttgcttagaggcaagggaataaaccttggaagttctggtgtgttcccaagttaaatgtaaaatccagaggggtgaagaattcaaactagttatttcagtttataataaattaatgaggcaatgtatttttttaatatgtgtaaaccagtttttggtgtcatgtagcaccggcagatttgtttctttaaaacccttcaccaggccattggctcacacctgtaatcccaacattctgggaggccaaggcaggcagattgtttgagcccaggatgtggagaccagcttgtctaacatggcgaaactctgtctctatgaaaaatacaacagttagccaggggtggtatcatgcacttctggttccagttactcaggaggctgaggtgggaggatcacttgagcccaataggtggaggttggagtgagccatgatcatgccactgcactccagcctgtgcaaccgagcaagatcctgtctaaataaataaataaataaatcccttcaccaggctcacaaaattaaaaatgatcttaaggagttaacagaaatatgtagacactatttcagataacatgagaatttagtctgttttaaaaaacctgcaaaacagagattcatgaaccacattttaaaaagacttctatgaaagctcttcagaaaaaaatattttcaaggtgtcaaaaaaaaaaaaaaaaaaaagaaccagacaaaatattcaggtatcaagggctaagaacagctaaaacatgttttctaatttgccagtggccagtgtgtcaactacattaaatggctgcttctccacctcatctcccagccaccaaataaataataaggggaatatgtagctgtaggggtactgctaagaaatcacagcattcaaatgatttttttctgaaatttattggaaacttcgtatgttcattcttgacatttttaggatttacttggcaagggcagaatcgtagaaaaacaaatagagttccctgagtaggaaaggtctccatttcctgttcatggttaggtgatcctgattactgtccttggagtcttgagccccttacccggtgaataattaggtacggaatcagggaggtatagactcatttgcctgggtttgttttctgggagtttctgtttaacattcctgaactggagcagaagtagattttgtagctggcttttctgagactcaggaaacagaattgtggaattctcaggttctgtgacatttgttgattattaaagtgaaattatgtgtgagaggaaaatttattcatctatgcttttaagaaatgtctatgataaacagaattagacatactatatagaattgcataacacaccaccacatgtccgtattacccagtttccacagttatcagcttcttggtaattgtttttcacctttatgcctatccatttcccaccaccatattattttgaagcaaatctcggatattgtaacattttatctgcaagtatttcggtacatatttttaagcagtcttgcttaaaataagaatggtatgtaggtgtttaatgtattctccaagctaatgcataatttaagtactcacagtctctgttgagactatttagatgcactaaatccaatcaaagagagaatttgttgtgagtagtggtcatctggaatggtccattcattgtgtatgggatagaaactctgtaggtccagtcaaagagtgatagcatcagagaatttctgtcttgaagaaaggagccattgttaagattgatgggttttctgtgttctttggtcccctctgatgacaggatagtgaaatgagccctagctccgagtacccacaaactttgtaaccatggataaagtcagccacttacttatctctgaaattaaacttcccgattttaaaaatggatgtgatgcttcctgcgcctattcacagtactgtgatacactgtgatttgggatgtgaacacgctttaaaaataatggcccggttacatattctcctttttattttttatttttttttaatttctttttgaaacagaatctcactctgtcacccaggctgaagtgcagtggtgggatcatggctcactgcagcattgacctcctgggctcaggtggtccttccccctcagcctcccaggtagccgggactacaggcacatgccaccatgccgagctaatttttgtattttcatagagatggagtttcaccatgttgcccaaactggactccaacttctgaggtcaagtgatcctcctgcctcagcctccgtaagttgggggattacaggcgtgaaccaccgtgcccagcctacatacgctcctttaacacaggcttttggttctttgaaattaccaacattcaggattcttaatggcatcagagaatataaagcttgaaactatctagaatttttttaaggaataattttctaatcttggttctctgcttctgagtatattttatttgggcattttatttttctccaagatgagatccattttcgctcatccattttgaaattgtttttctctctgttaataaaacctttggaatggtgccttgatcaggctaactccagattaaatgtttctctttgaaagattgcctggtgatcagagttgtttttcattctcttttcttcttttagccttgcctccccgattgaaagagatgaaaagccaggaatcggctgcaggttccaaactagtccttcggtgtgaaaccagttctgaatactcctctctcagattcaagtggttcaagaatgggaatgaattgaatcgaaaaaacaaaccacaaaatatcaagatacaaaaaaagccagggtaagtataatgcataaaatagtagagactgcccccagcaataagataacatataaatgttatttagaccctaataagtgaatttactatcagaaacataatagataataagtgaaaagctgtttcattatataatgacaaaaaatcatgttatcacataggcaagaattcttgtggttcttacatcttattgatgaaggaaataaaggatggctggagaaagaactgtaggaagtaagaagagatggaagggaagaaggaagagagcattagtggtagatgctgtcatagtaatagatcctaaaattcaatttcttggccgggatggtggctcacaactgtaatcccagctctttgggaggccgaggagggcagatcacctgaagtcaggagttcgagaccagcctggccaacatggtgaaaccctgtctctactaaaaacacaaaaagtagctgggagtggtgggcgcctgtaatcccagctacttggaggctgagtcaggagaatcacttgaacccgggaggtggaggttgcagtaagccaagagcacgccaccgcactccagcctgggcaacagagcgagactccatctcaaaaaaaaaaaaaatgcaatttctttaaaataagacaaatgcatatgataatttagagtaccagtgccttacacagttaaaatcacaacttcattgtaaagctcagtgaatacttagatttatggaaagaattggaatgtaaccagttgaattcagactattttttaacaaggggttaatgatataattttatctaataagaatttttaactgacactgctgataaagcacatcatcattctagcagattttaaaattaggtaatcttaggtagcaagaattttacatgttcctaccctccccgaggaggtccatatttgacagggcttcatgtgattcctgtaacatcttggtggatgcattctgtatctactctaaaatgatactctgttatcatccctacactcttcattcttatttacttccttacttaagaatcatttcttctaatatcaaactacattttgaaatcagagaagagataagtggattagatttttgcttctaaagagtcctttaatcaacgtgacatgtataatagtggttccaaactcaaagatgatattttctgcactcacatctcacagggttccagtgaacccccaagtatggtaacagaagcaacagaacaatctcctatactttgattttataggacattaaccagaaagttgttacacattcatgagcaaagtgattacaatgagaattaaatttaatcttatcaaagattttgctctgatgactgtattttcttttctagtttctgtggttttattagctacatactttattaactacacgttgactctagttattgatcatgtcagatagatctatagctttggaagtataataaagtgtaaaagaaagggttgtatcactttctgcagcaggtggtacttcaaagatacaaaatataatactgtaaagagacatggcatttttatacctaatattactaattttttttacattattccaatatgtagcagttcagcagcacatggcaactatcttattttgcagattaggaaattgagggtcaaaaaagtgttctgctttgcctcaagtcatataactagtaagagactcagtgagagctgagtttatcattgttatacccattaaaaatgtaatatactgagaatgaaattaagtttcttcctgtagatcatagtggtaattaatggttcaagttagatttgaaataggtctgactctaagtctcatgtttaacagcatatgtgcatgaggggaggaggaaatacaatgaatgaattgaaaagataagtatgattcttacaaagaagtttaacaggacaaaaaaatactcctagattttggatggaatggattttggtgtttgcttttcatcagacaagttagtaaggaatgaagttatctctacatgcagggtaatgtctcatttatttctacgtggctgtcaaaggataccagtaatatttaagtgcccatgaaaggttttatgctaggactgtggagaaattaaagaggtatagggcattacaatctctgtgcccaggggcgggggtcataagattgtacagagattatctagttcagtcttatatgaaacatgggaaattttggaagttatgtattgaaacactgttagagcaggggaggaggaagggagggaggagaatttcatctagaagaaagcatctcacattgcagatattcaatctgatgctacctggagagaagcaaatgaagttcggtagataagatgagaaaatgaatttttttaaaaaagtgaactgactagaatgaataggctttagaaaaggtacatgtatacttaaagaggtaatttgttacctggcttcaatgacatataaaagtatcattagtattcagaaaagcattttcatattggcttcataggtccagacagctaagagcactgtctacatattaataaaatcccattataccagaaagggcaatagttagaaattacttcttttaaacaatagtcttgctggaaagaattaaatggggaaaaatgtattgaagtgatgcaaccataaatcactcgcagcaaagcagttaacatatttgatctaaaaataagacatactttgtatagagtggacagctacttgagaagcgatcatcttatcagtttttagaattgggtattttgtcatttctaaaattgtgtctttttataaagaagagcattgtcagcttttttaagattaaaggttccaactgaatctcaatttaattaacatttgcaaggtgttctattatttcaatttatccagtaaatataagtagaaggaatataattattgttatacccatttaaaacattaatatcctgaaaatgaaggaagctgagtttcttcctgtagatcatagtggtaatgaattgttaaacttagatttgaaataggtctgactctaagtcttgtgttttttcaacagacatttgtgattatgctacataaagttagaagtcagaacatagggctctggcatgcttaggataatgtctttaattaaaagattcttatttttcagatgcatttatatattactattaatgatttttaattactaagatattcagactattagtgttttgcagttgttagttggttacttgacttaaactttttcttaggctatgatcaaccaagcagaggtgaagtttagtttgaggtgtaagatttttctgggattctctttaattaaatactttgactctttcccaatccttagtcttggcttctttttcacacttcttataatcagattatgcatagcagccaacatatccttttaatctcttggtgtttagtggcacaatttcacagcaatatgcaatttctattattttgtaaaatcttacccttgttttgcccacggtcctactaaaaactacattcctacgtgttctttgtatgatttttgaattcccattgagcctttgtttatttggctaacccatgtgtggggccaatgaaaagaaatggaaactaccctcatgttatatgtctgcttatgtctttgttcttgttttctttgattggtggatgattttgatcaagaaaactggttaaaaagcttggcgtgtgacagattcatatgtaaggactggcagattgacctcatttaaatacctgttctatcttagctttattaaagactggcttcctattatttgtatgtttcacacacttttggacaccattaattttgcctcagctcttacatattttaattttgtttaaaattggctgtcattggttacattggacaaatattacaattatttcctctatttttactggttgctttttttgactttataatggaaaaagtttatgtgcatttcttttctcatattagctgagcaactctggcagatcacttgaactttatatataatgaaatctcaatgttcttatgtagaaaatgagaatcctcagtggcattccatatggtttatgtgaggcacttggtacagtgactggttctgttgcttaagaagcctctcttttagccaagcacagtggtgtgtacctgcagtccctgctactgaggatctcttgagcgcaggagttcaagaccagcctgggaaacatagcaagaccccgtctctatacttaaaaaaaaatcataatttcctctttcacttctttgtccttttcacgatgatcagttttacactatctgaagcagtgttggacacacacacacacacacacacacacacaaacactgtctatataattccttaggggtcagggaaccaaaactgtataaacagaagagttcttccctatatgtgtttaagttgccttagcctgtaactatggtagaataatcgagttaaaataaaactaaactaaataatagctaatggaaccttgaattcaccttgtaagtgagcacacagtaaaaaacacagtgtgctttctgatattaaaaaaatgaaaaggaaattaatattcagaactttttatcttcaaatcacttcacattaatttatttttacactgtactgttttttcttattctaaaagtaatgcatgcttattatgaaaatccaaatatttcaggaatatagaatgtaattactataataatagctaacacttattgggaagttactatattgaaaaaattattttaaacactttacacgaattaactcatttaatatttttagaaaataaaaatccattgaaacaccaaccttcctccagatccctagaaaactcatcaattaaagagcaaaaagttaaatttatgactataagggaatcaagtagtctttccaagctaatttccttcttatagacagagtatggtatcttacagaaaagaaaaaaagaagactgttgtatccatacttatcaaagccccaaatctttttgcaatatataattttcaaggaagatttggctcattctacactcttactacattctgtccttactctaggacacaaggctggatgaatcccatagttaaatgtatcattagaattcagagggatgtttatgctccttgaggtcagtggttttccaatgatgtctctgtagagtcctaaatttctattgaattgcaaaaaggattaccagtcactctgacctggaacactttctgtgtgatatttttgaatatgaggttctgatttaagctttcattttaaaacaggattttgttgtaaaaaatagttgaaaccactgatctaatttaatctttctctgcacagagatattcttgtaggaatgtgcttggcaggtggctatccagacttgaatctttccaaagagaaaacctaactctttcacaagacaccctatacatttttgaatgctcagaaaagtgcttctatgtaatatcattcaaaacatgtttcctttttcctgtaagacttagttttcctgtaagacttagcaatcccaaataatttccttttccatatgcatcctggaaatatatttaaatagctactcatatttcattcatagttgtctgccagtgggacctctgtttctttaacataatcctctctagtgataagatttctaggccctattcaattctgatcaccctcttctaaagtcctttaattatgtttttttatcatcaaatatcattccaaagtatatccaaagtataattcagcattctagatatgatctagccgatgaggaatgtattggggcttttatccaagttgattgatgctctgctttaatattaatttggctaaagagtacataaggttttttttgttattctttcttcttaaaaatagttttaaaaatgggttaataataagcatgtggctaattagaaatccttatttctgcatatattgtagtcaagggatatctcctcttgtatttatgtcaccagttttcgtacgtgaatgtacttgtgatgcttatctcgatcaaattgaatcttagtcttggcccattgatgttctgtcttaggattcccaagggtgttctccatagaaaagattccatggccacatgtcatggctgccttagaaattcacagtacagatttgcaaaaattcactgagatgcattgttgtaaagagacctatttaactttttttaatgcaacatttattttagcatagaaccattttttttaaatctctctttcttttaaagcctaacatttgattgcattactaggaatagtattccaggaaacagtgccaaggcctattaggagaagtttgattttaagacttatccctttaagattatgttaactgtaaatatgattaccatgttttcttatagttccatctagttcaatagttaaaatgttaattgcattgggtcaagaaaggggtctttacatacaaacacgattgttcctagatttgtataaataggaaagaaaggttgttcttgagggtgttgtaataatcttggagttgtaaattcttgggatgttgttgtaatcttatctcagaatttggggacttaagaaaagctacagttttcttactttagaaatttactccttctgtggcattgaaaatcaagatactatgccccaccctgatattgttcataatttatctattattgctagtggtttcatggttatacatgaaaattcttccagcaaaccatgctaaatgttgggctggaaaatcttacagtgcttatccatttttttcctcactatttttcaaaggtacctgtcatgaaggaaacttgtcatatatgatcaaagtagatatatagctgataatccatttaaaaaatcatacggtatttgaacgctccaaaattcagccccaaaattaatacagcctgcattgggtgatattctaatattgttttatttcgataattttaaaagttgtcatattttattgttaagacatatctatttgcaaagatacttgtcatcaaaaggcccattttggcttatagggatatacttcagggaagctttcctatgaataatgtctctggttgatgtgtgaatattctttaaatggcccttggtggtctccccattcctagatagataaggctgttaaattacatccactttttgtcaactttgttccgtggaccattattttcagaaaacattaacagatatgccttgtgaatgaaaaggattccatggtcaaaggagtttgagagaaaataaataatatatcccttttcggggagtcagagtacaacagcatattcaagatgctgagaaatcctgtgagattaaagataatgaaaagcctgtctttatttcacctaatattttccaaatttatttgaatgtggaacacattgctttgttacctcatgtttacctggttgacatcsaktcccgactagcgcagttaacttttctttttctttttctttgaccaagtctcactctgtcacccaggctggagtgcaatggtgtggtctcggctcactgcaacctctgcctcccggattcaaatgattctcccgccttagtctcctgagcagctgagactacaggctcatgccacacacctggctaatttttgtatttttagtagcgacagggtttcactattttggccaggcttgtcttgaactcctgacctcgtgatctgtcttcctcggcctcccaaagtgctgggattacaggcgtgagccactgctcccagccgtgaagttaacttttcaacccctatgttggtttgaccaccactgcccctggtctggaccacctctgatggtctttgccctctcattatggcatttttctttcctcccaaccagccttagaaatattaggttctgctgagtacttaagcaaacatccagatattttattcattcattcacacatttattcaataatgtctgaagagaaagcatagcctgatgtatgctccacgagactagcaagaagttgacattatagctacactctccaaagtatatgtcctaggtcaagagatgagacatactgaaggaactctcatgagaggcgtactcagggctgtcagaatttagacacgtgagagcagctccagctacatgaccaggaggggcttggtgaagcagttggcacctgacatggccctggaaggtcagctgagattttgatgcataggaatgcaggacccccattgtaggaagaaaaaatgacacagacaaaagcacagaggtggaagatcagggggtctacatgtggaactttgggtggttcaatcggatagactggaggatactagtaggaattatatttggaacaattgatttttctcagttaacattaatgtgtgacaagaagaccagaaaattcaccagaaaactagcaaagtataacgtgggagatttgcaaccagaaggattactgttgtttcttcctcctttgttttctcccttgtcgttatccccttaagagcccaataaatcacagttaccaggctagagcatagaaggattgctattattttttggagataggggtctcaccctgctgcccagactggagtgcagtgactcttcaccagcatgatcatggcacactacagccttgaattcttgggcccaagtgattctctcatgtcagcctcccaagtagctgggattccaggggcatgccaccacaccaggctttagaataattctttagaaagaattcagtaaactctgagccaatccctgctgttctgagttcttatatcttggagactgcttaaattataggttatgtgcaacagtaaaacacagacacagcaaatcacaatgctgcccatgttaaaaaaaaaaagtgaatgttgatgtaatattcagagttttataaaactatgtgataatgttgcccaaatatttattccagtattaagaacctttcatgtggtactatgctcccagcaatgagaatcttaaggaaagaaaaattcccttccttttggaattgataaatcctcttaattcaaaattaacattattcttgatgttactctactgagaagaagagtgcacagtatttttaaaatctattctaaccttcagtaagtgtccttaacagacttgtaggaaatgattttatacatttttctcttcctaaaccctagtggctgatggcatttggatatagaaaagtaagaaaatttaccaattgggtttaaaaatctaaagtataacacagttattggtgatggtaagggagtaaaaagaaaaactacagaagaattcctttaaactactgatttaggtgataaaattgagatgaaatccatggtacaacttaaatgtgatgcatcttacttttactctaggtaaaatcatgaggtcagatcaatgtaacggaagttgtattttaacatatgtataaggtggggagaggcagtttgagaactctgaaagcatagaaaagtatgtatttatatttgttggatttctgtgatatatactgacaccactttggtcctgatcttataggaagtcagaacttcgcattaacaaagcatcactggctgattctggagagtatatgtgcaaagtgatcagcaaattaggaaatgacagtgcctctgccaatatcaccatcgtggaatcaaacggtaagagatacctacggtattctgttcctcaatctgtaacaagagtaatcaaaacatgtggtaagactcataatagactggtgtgttaaatctcattgtgaacaaattaaaaacagagaaagaaaaccagatgtttcaaggatcttgtatgtctttcataaatttctgtactctatgagattatatagacctgaaatatacatatattttttacaaaaggattttaataaggccatgaatggcagagataggttgggttgctaaaatataggggctatactatttttttaagttggtcagtgagggcagtcaagtctttggctctctgaacaacagaatacagtcatatatatatacaggatatatatacacaatatgtatatatgcacacagaatatatgcatattatgtattatatatgcgttatatatgtatatatgtttacgtatatataacatatgtattatatatgtattatgtatgtattatatatgtattatatatattacatatataatatgcatacatatataatatgcatatattctgtgtgtgtgcagaatacagtcctgactcaattctggcaattttattcccattacatctggcattaggtagtagaaagttaaaccattaattttttttaggcctattaattttgaaattaggaccgtcttagaggcaataaatttcctactaggaagaggcttcatcttcagctttgttcagaatagtaccaggcaatacttgttaaacaaatgaatgacttagaggtaagaaatacaatccacctctgacaacttctgtgttattccaggaaattaaaagaaccaccccgatggctttgtgttttgtaatagcctgatactccatgatttgatggaatcatctataggagctgatgatgatgatgacctagcaatgcttctttaaaccttttagaataatcaaatgctattttaaaacctttagtgcttatttatttatttattgaattatggcacttaactattgcctttacaaaatttgtcatctgttatataaccaagcctaattgcatcttcttggtaggagatgagaaagattctgcatttcaaaggcaagcgctcttaaagtgataaggtaaaaatgccaggtcagcacaggcagagttaaagtaattttaagggttaattctatgggaggctgatgtagtttttgtcacttgattcttctgtaacatactaagaaagtgagaagggagataaaaatcagaaacagggctgggaaaattcaggttaatgcctcatcctctctggacttctcaaggatctgctccatcacagagtaatcaaagtttatcactttcattttaaatgtctccctccatagagagtaaaggagagcagggaaaaggagtttccattaccattaggagtcctgtttattacagtttaaaatgtaaaagccatttaaaatttatatgagtaaatatagcatcactttattttttaaccagggcaggttaagcaataatagtttgctagtattactttaccccacgtagaattctataggatgctacctgaaacacacattaaaaaattaattttaatgggctgttttttactttctactataaccattgtttgaagctcgttctccttagtttgtcactggcttggttcagtgtgtttcctcatagttaatggtattcaattgtgatttttgacacttggatttgattcgtgtagctataccacaaagtcccaggaaaataaaattaaagctagtgtcatagtctcactgagtgtctacagaagtatcatattgattattccatggtttctgatttacaggattaagcaatgaattatttactactatattattcctggcaaaaacccatagaattccttttttattaatttgggggtactgaaagtttgataatatggctttttacatttcttacataggaaaaacagctaattcattttttccacattaattcactgaagtcttggtctagtgatcaaatttgaatatgtagtgttgaccaattatagggtagagagatgaaactcgaggtgtttttgataatgagtcttttttacctggcaagaataaagagaagttcatggaatattttaagtaaatccttcttaaacaaccaacaaaaattctttcagaaataggttcctatggacttatgtaattaaagcctctgaagaatgagaatgaagagtctcaattgcaatgcaagttggccttctttttattctcttcttggaatgttaggaatagatcatccttatccaaccccttcattgtattaaaaaagaataaaagacagcatagaaaacagacttattcaggatcacagagatatttaacagcaaaaggagatatgaacccaggttttttttgttttttttttttttgtttttttttttttttgcttcattcctaccacagtgcagttccatctgtatctgaaatgttttttgtgtgtgttttcttttttgttttttgagacagggtttcactctgtcacccaggctagggtgcagaggtgtgatcttggctcactgcaacctctgactcctggactgaagggatcctcccacctcagccccctgagtagccaggtgcatgccattacgcctggctaattaaaaaaaaaaaattttgtttgagatggagtgttgctatgttgcccactctggaactcctaggttcaactatgttgcccactgtggaactcctgagttcaagaagtctacccaccttgaactcccaaagtgctgggattacaggtgtgagccgctgcgcccagccttactctgtatctgactatatgcttgcaaatgtttaagtgagattcttttgcttataaagaacagaagctgaaggaatggtatgaggcctaaggagtgagggattctatggcgaagaactagaacttcattataactcagcctcgaggagatggaattgtatgctgagcatctctgcgaatttaagcaatgcgagtttgtggcttttctctctggtgtttctacctttaatatgcttctgatagttttaacaaaagttacctaccttctcacctctcctactttcagactccgcctctttataattccaaactttgacctgtttcttgcccccacgtggccatattcttcatggcaatttcaggcattctttcagctttaacctctactgtatgattgtttccttggttccccagtgaaattccgcagaccaagaatcctattagcaaagttgattgttgcatattcattaaaagacctagagaacttacaaattatctgctgtctggtcatacgtccactgctgcctcaactagggagggtggagccggaaacatagctgcccggaagctcctctcttcaaagtctgggggtggagcatgcagctcacctgggcctgtggcttggcaggcaccatgattgacaaggccagtttcctgtacattagaggagataccctttttgctctgcaccttagagtcctagttatagtgcatccagaaggaaaatatgtaatcatcttgatcccttatcctcttccactgctatctaagaatttgctatattctgttcaatgcttggttgtcaaagaagcctcagttgggttctgagctctccggggcttagatgcactgcctttgtattgtctcattcctgtctccctaggaatcagggcagacgttgcacagaaacactttttctgagagaaaaagggcactttctactgggtttataaattgccgcaccactgaaccatgtcttcctaaatagatatttaccgttgacttgggctgatagagagtagaattctcaagaatttccttccctccctccttccttccttccttccttccttccttccttcctttccctccctccctccctctgtctgtctctctctctctttccttttttttttttttttttaaatggtgtttcgctgtgtcacctaggctggagtgcagtggcaggatctcggccactgcactggattcaagcaattctcctcctggattcaagcaattctcctgcctcagcctcttgagtagctgggattctagacaccccccaccacaccccagctaatttttgtatttcttgtagacaaggtttcgccatgttggccatgctggtctctaactcctgacctcaaatgatctgcccactttgggctcccaaagtgcttggattacaggtgtgaaccatcacacccggtcaagaatttattgtttcattgtggattctagaaaaaaaaaaagttgttaaaataagaacatgctgtcaaactattacattatgtagaactccccttgagattttaatttatattttctatgaactatcagtcactttattaatttcattttttcaccttttctatgtatttccaagaagctcatggctatagtttcgagaatttctatacaggtttccttgatgaatgatccttgtaggttgctgcaatctaattatcctaattttttcctatgcagaggattccttgtgattcacttaaattctcacacagttactttttgtatgttccaacatgtttagaacatattttgatacaagattctaagagagatggggaggttgggggagacattcgttggaagctgtttactttctccccagatgaccttgctgtttggcatgatgtttaatctcattaaggaagctatagtaattattaaaataaaattagatcataaaagtcttctgcaatgaaactcattgtttagatctatctggattagtgactaaatataaacgaaatgattaaaaaattaggaaattccccttgaaacagtatatgcttgggtgtaacagtggccatacttatactgttttcaagcacttagaaaataatacagtcaagcattttgccaacctacattttagaaatgtaggtgttttctgtcttttccaatgcctttcaacccctactttattcagaattagagaaagtaatttatcctgtagtagacatatatcaacctatgcaatctgctaattacttctgggacaatgtaaagcttacaaagaccagttgggttttcatataacaaaggatctcataggcagtaattatgtgataacttatgagtgaattcctttcatgaattcgtatatgacagcagaaaaggccacatacatcatgtttacacaccctacacactatatgttcatttgtatttgtggtttatttggctcagtctgtatataggaaaccttgacttagcaattaattcttagctaacaagctttgtgaaaactcctgggctttagagtagggaagagaataatagactttactggtttccaaattaattaagtaatgctttcttttaaaagattaatataggaaaatatacaactaatcaatcatatcttctcctaagttttcttttttaatcagaagaaaaattatttgaatgagattcaagttcccacaggagcaattgggcttgtagcaaaaaaatagctgtttcatttgagatgagcagaaaaatattatttttataaaatttaattaaattatcaattgcagcttttaaaaatagactcatactggtaataggcttcgccttaccccctttcccaaattgataatgatgttagaaatttcacaatattgggaaacaacctgcagttatgttgaaaagcatgtaaaatatgttttataatttgtataacagtctacatgtatattgtattatgtaggatgcccaggaaggcaaatacatgagaacaatatgaaagcaatagggtagatttgtcttttcaatgtatggtatccatcctgtctacactgtttattaatttcaaaatttctcagttgccttagagtaagcattcattatgaacaggaagaattcaggtacttaaagatgttccttaagttatctttataactgctaataaataaatatgtccacttttaaatcttttaaagaaatcacttgatcaaaatttttgtatgtacagcagtgacatataagtttggtaaaaaagtcacataagtgaatgttggaatacacacagacacattttatgtatgtttgtatatactgtatacaatgtgcatatgtgtattttgctacataattatatttagtgtattatgatcatgatgaaattgcaaacatgttacattcataataattagaaaaattcctttctagaagatatctttgagaccatgcaactttttcctgagaccagaccccgtttattaagaaagaattcaaacattacaaatatactaatgttcattatgtttacttgcctgttcagcataagttgctcagctgtgttcagtttctgataattctaaaacctcattaatttgcactaatgaaggggctgtcctttataaattaacaaatgtaatatgccaaattactatgggaaaatatgttgcttaaataaacatcataaagattgcaggatttaatgcttttttaaaagtctgtaagtgtaatataaaattactttcaatttacttttaacaaaaggctgttttccaaatctataaattctacccatagcacacataaaaatgcttgctgagtggttttaattaaaaagattaactttcttactagcaagattctttttacaatgaagactcctttggtgtagaagtataggttaacttttgagcttgtatttcctccagggttaattcagaaagtttgtatttgaaaccataatcattaaagatattttaaggtctccaagataaatacctgattttaggaagaggagttattttaagttgtctctgtgtagatgcctctttgtagtaacctcctgttctggtatttttaggtaacattcaattaaaaaatgaaacattatggttaaccttccctctaatctgaggtattttttgctggagatagaaaagttctgatttttttttcttcttggaaggtcacagtggacagctactttgtttgtcaaaaataaatttgaaaagagtcttgatatccgaattgggattgggacttctgcccagctctagttgagcaccttgggtttacgacttcatctggttgtaatgtcattgatgaatcctgaaggacaagagaaggaagcatctctcttagtgtaggtcctttgtttggaaacatggcccttctagatatttctagagaaggacacacactttgtatctctaatatagtttctttgagattacattttctcaaagaagaacaatttcattttctgcagcccaaatcaagaaagcttgttggtgctgcttcagaaacagatatcttcatattaccaattcggaatatcctctttctcgcctgatgcttgagaaaatcctgagaaaatgatgtaccctcacatactaattcctttcagtgagccccatttttagtggatgtaagagccaacgtaggcaactttgatgtattgaaaccaagcttactccttgcatagtttgccctcctaatctgtgattagagaggatcatccacacttaatttgcagcagaaagacacatttggtcttactaaaggtttattgctaatcacttgttcttaaacattgctgctgagtctcacatgactttgtttccctttcaattccacaaaatcttttgtccctagagaagcttcagagtttgaagaaatattggcgcttaaattgattctgcttacctgctagactagtccaatcttggaaaccctaaatggccatatctgtatttaaagatgattatattagtaataaagttttctactccattattaacagaatattaatttaaacataaaattatatatgacctgcttaggattctcggttagatctcataatttttgtacagtagatagtatcgcagtagattcagcttatcttttgtcctggttagaaaatgtgaactaccattaagtcatttggcaagacttatgacacagtgaaacttgaatgatatacatcattgcatctctacatctttccaggcttcataaaactgtacctttccaaaagtgttagattctgccaaactgaagcccttttcagaactgaatatggaattagacagtgtaactacccattccatcataaaggcagtaagaaaacaagttgaaagtttgaataagactgtcacaatcctcatgaaaatgatgtatccagaagtatacaggttggattcatccttcatttctttgggtgggagctgcatacttactgcctgggtagctaatgtctatcatatgataagcacctgtcttcattctcactggcaattttaaatagaattcaatgccagaacttgatgtttttcaccaatcctaattagaaacatggcttacttttatttttgaacaaaaatgtacttgttcaaagatctgtaacttaaaaattcttactacagcttggcaatccgatagctttgactttcttagttcccctatttcgacttttcttcctgagaagcctactgcctctttgacataaattcttcctcactgacccaagtggaggcagtgaatgcttcctaattattttagcacagctgattttatgctctttgcataagaaaggagaactatcaatttggactgtctttctgcatttctcactctctgtatggttaaagcctggacttttctcactcccttgcaatacttccttcctttacacttaacttttagttccaaggcaggctgtggtacctgctcccggcctcctgtttatatatcataatgtcctatcacctttttttttcagagatcatcactggtatgccagcctcaactgaaggagcatatgtgtcttcaggtaaggaaaataagcctggcaaattttactaaccagaatgacaaccataactgctggctgctccttctactaatcagaaccccttctgcatccagacctctcagctgctcttgttttctgcttcaatatttttctcaaccttgttctgtctttttggattttacttaagggaggatggttcttgctgtgtcttcaaacttaggcctgagaaacatacatgagtgaaagaaatctatatctaggtgcaacttaatgacattaagcaagtaaaggagatatatctgagttacaagctcagtttttatgtctttccaggtgattctcttagctgccttctactctttcacccctcagagtgtattcctgggtaatttgtcaacatctgatccgtgacctttgggtttctaataatcagttgtggatcgctaaacttaacaaaacaaaacagaacagaacagaacaaaacaaaacaaaaagacttacagcctttaaaaatgctgttgtctttgttttggttggtttctcacttgcctgtagtatttgctgatagcacttatagtctgagcagatattagcaacttagaacccaactctagcaatgcatatataaccataattcattgatttcttcacaagctatgaatttaatctatcctctatgtatttcattttttaaactttttcttattctttgtaatgctataattaatagagccttagaacatttaaaaattaatctttatttggaagaaaatttttgaagacccaagattggaaattcatctcagaggtacaatggtaatttggttttgcatggtgccttttcttttacaaaaattcttaaatttcatttgataatcacaataaacttgtgaaacaagacatcatttttcctcattttacagatgagaaaactgaagtattagaaatgttaagtcatatacctcaggaagtagaagagaaggtatttcaagttcgatattctttttattactccacatttaatattttagcttcattgagtttttcattatggctggtaccttgttgaaactatagaatgacctataatcaacatgtctttttccatcttacctccatcatttcctcttcccttcaaagccattttttaaaaccataaaagctaaacatctctgtatcctagactactttagctatatttaggacatattcatatgtcattactaagatataagtgtatgtgtgttgcggaatggtatgatcctggagtctaagaggttgttactcttctgaggaaaggaaggaaggaaaaaagaggaaaagagagagaaaaaaagaaaaaaaatcacatattctaaatttcttcacctttcatttacacgtttctgtaatatagggacttcgttatctgactccagtaaatgccattaggaaaaaaagagcttttacatttatatggaacttatcttgggaaattgactataactattatttcttaatatgtgacttgaatcttgataactttctggctgttgactttcaatccttctttgatactaagacttctttatttcttactaatgaaaacccatccgttccatgcttttttcggcatgagtcatatttttcattctctctgtacttaatgactgttttttcttcttttatctttgctacctgagaaaatcttgctactagatatccccaactattgtatgatttatttaattagcatggtttgtttgatcctaatgtaattattctattgctctagcagactttgcatggacttttcagcactttctggtccggatgtttatgcagatccaagttgcctggaaatactctcaatcttgtttgtttatttatttggcatgcatgaaaattggctttcactctcttggaatccaggggctattctctttggtttcatgttttctcaaaatcaagaccacatctgaaagaaggaattttctttctcacctgtggtgtgtatctcctcagagtagtctctcttggaagttcagataatgcttggtgtgtgggatattcttacagatggattgactccattttcatcccttttaaaagtctttgggtctagactatggtaatattcctttgtggtctttgagtattgcattctgacttataaatgcttcagcttctctgttgcacggtgttctactactcttttactaggcgatacccaagcctggcaaatttctaatttatgagtccaagcagcatgactcaataaagcctcattccacttttatgttttatagagtctcccattagaatatcagtatccacagaaggagcaaatacttcttcatgtaagtatacttaaatattctattcactggtttttaacccaaggcactatctgctttggaaggtcatgttcacgtctatcttctgcccctattaagggtcagagtattgagtttggcaataggtggtatttgctgtttggagtagaaatggcctcctaatatgcttaaggacaactagacatcctgtcctcccaatatacataagaatattaaaatacaccacaaatgtatcagttttagggtaatctggtggctttgaatattgaaaaataattgcacaagttctgaggcctaattcctggcaagcagtagagcacattgtgtgtcttttcagcttctctggatgccttcagcaactgcctgaggcatgatacccagctgtttggagcttccgttccaaaacttcttcattctcatataaagttagctgtgatggagtaagaaaactatatatagatgcccttaattcaaatttgatagcaagtaactgattatgaaaatgtttgaaagcaagcccctaggcaagatctcagattagttttcgtctatttaatgtgaaatgggctttgtgcttgtggacttctataactgttagattgattggggttttgtgctatgtcgggggaacttaaaatattagcaaggactagtataaagagtttttgatacttataaattgagaatatcatcgtattaaattttgatactcaacaggggagtttatcaaaccttgaaaattaaacttataactacagtctttctcttccttatgttagctccttatttaaagcatttctcaatttgataagctcttcaataaatagatgttcctagttattctatttcgatctggggagtgtgttgaaggaacaatttccttttgctatcagcagggtaggaaaactcatgaaaagaaagtctgtccttttggcaatttaagttgttttgtcaatctgtttaaataaatcctgtttgatgttacagcctttccctccaggttggtgatactagaactgtaactatatggtataaaattatcttttattgtgtgaagtatggtgttttggctatattttaactacataaagcgtcatttaactggattgatggcaatagcctggtgagatcaaacaggaaatgaaatgctagaaagggccaaattagtttcctatgtgttccaagggctctcatcatatcctccaaaatgataatttctgccggggaatttgtgctatttgttttttaattctacttataaaaagattagtataattatatggattttatgtagctagcatccaggaatcacattgagctttttttttttaagtgtttattctgcagaagcaaatactaggtttttcttttttggcattttgtctggaaataatttctctcctgtgtgattcattgaataaagttattgaaactcttgtaattggaacccttcatgctatcatcaatgggaccatagatactatccttaagcatatctgagcagtttgagaatgtaaaaaaatacttttggttttcccaagctttggggaactgaaataaatctctcagtttatgtttctattcattgcattatcactgagagagaaataattatgaaatctgactccattccctaattctcagtagaattagtttttgatatttggcaatggtttaaaactaagaaaggaagctttgtgtaccatgatattaaaatatttcaatgtgccattttcacacatcagtcacccggggtcatggtaagttctcagtaaatatggttgaattgattcatgaacacatttttttgtggaacttaattttattaggagaatataaacaatgaatataataaactagtaacacgatatattagaaggtgctacgtagtccaaaaatgagaaacagtagaggaggggaggggataaggagagttgaaacttgtgatttttattaggttgatcaaggtaagtctcattaaattgttgatatttggacaaaaagtggaaagaagtgaagggttaactttgcaaacatctagggaaactggctgggcatggtcgctcatgcctataatcctagcattttgggaggccaaggcgggaagattgcttgagcccaagagtttgaggccagtctgggtaacattagtcagacctcagctctacagaaaattgaaaacttagctggacttggtggcatgcacttgtagtcccaccttcttgggaggctgaggtgggaggatcacttgaactcaggaggttgaggctgcagtgagctgtgattgtgccactgcactccagcctgggtgacagagggagactctgtttcaagaaaaacaatcaaacaaacaaacaaaaaaacatctggggaaactgtatttaggcaaagaacaggctgtacaaaggcccttagacaaaagcatggctcatgtgccgtgtaggggaccataaggagccctgtggggttggagtagaaggaacaaagggatgaaatatagaagatgagggccacagaccctggggtctgagcatgtagtgccttgtaggccattgtcaggacattggtatttaatggaatcactctggctcctgtgtgaagaatggctcactgggaggaagggtagaatccaggatcccagttaggtggcttttgctgagagcatagtggcctggcccaggctggtagcagtagaggtggcaaaaaagtcagtctgtaatagtttgaaagtcaagccagcaagattccctaaccaattcattgtgaggtgttagagaaagagaaaagccataggtaaaaccaaggctgcttttgtttttggtttttaacttttggtgttccatttgattttcttctttggctttttcattatacttcttcatattaactattgttttacttgtttttttataattacaatatgcatgttttactaatcctagtgtgttttttaaaattttagattcagcgggtacattggcaggtttattacattttttaatctcatgaaaatatgctcttcagtttgaaaatataaaccagtcgtggcaggaaccaggtccagtcttagttacaataatgaaaatagcatgaagcacacagtccatttcaaggcagccacacgcaggacttgcattgcagggaacgactgtgaggtacaaatatctccatttagtaaaggctgaaggtgaaccttgaagagtcagcaataacaataagccaaactcaaaaatgccaaatatataaaaaagtcaaaggcctcagaaaagtttgcctggtcaaaaataatcagcttcaaagaatagatttcttttcactttattttagccagcaaggagatgctagtaaatccctgtatttgaaaagcgaactctgcttttctaatgtgattgtgcctgtaccggctacattctttgaactaatgacattggtgttttctaaagtaaatgttgaaaagcctctctgaagtagtatggattcagcaaacattttatgtattaaacagttctctgcgatttgggggtcagtgtaagacaggggaggctttcagagcaaacagatataggcagaggagatggatctgacttcacagcccccaaagttcccttttttcctctttaactcatgttggattagaagaaaaaaaaaaaaaaaaaaagagcaggcatggtggctcatgcctgtaatcctagcactttgagaggccaaagagggaggatagcttgacaccaggagttcgagactagtctgggcaacacattgagacctcatctctataaaaaaataaagaaattagccaggcttggtggcagccctgaagtctcagctacttgggaggctgaggtgggaggatcacctgagcccgggagtttgaggctgtcctaagttatggttgaaccactgcactccagcctgggcaacagagcgagaacttgtctctcttaaaataaaaacaaacaaaaaaagaaagaaagaaaaagaaaaaaacaaaaagaagaaaatagaagtcactcacctacccttctacctacttaatatattataagcatttttctcatgtttttaaatagtaatcagaaatatattttataggtcactgtaacaataaagaaatcattcttgactggaggtttttaagggattttttcatttacaaacacattatcggttttgccccctttctgtttatttttcctaccacttgtaaatattagtgaaatatcaaagttcttagtccttccctttgtaagacaatttttactactcaatttttggaaattggaaacttccattgttcattcactagtttagagttgttaattatatttttaagttctttatactaatctaataaagatcaaaattataattttctttattttcttttgttttttgtaaatgaggcatctgtgactaaaaacttataaataattgcctaaatgagttttctattacatgtaagtgacaagttttaggagaagaacttgaaccttacaaaacagtcaataggactatcttgctgctccttttatagaatcagcagaagtaaagtgattgtttggaacaagccttaatgacttcttctggagatgccagctgctggtagccccattttgcagacaattctgttgaataccataaaaaattgttataccaaccactttgctgaattaagcaccatccattccaatttaatacataaatgaggaaaacaaaacggaaaatctaacaaatagtaataggaaagaaaatcaagataaatcccgggaaaacagttgaagtggtaatatctgtttcaaatatgaataacagcaagcatttattgaaggcttactgtgtgccaggtgttgtgctagatgttttacatggatgatgactcatggttatcatgaaaacttattacactgtacgttgaaactgatacatgttgtccaaagtcacacagcagcatttaaccccagataatgcagtggactgctatgtcacataacgttttgctgcctcaaagaaaaagcccttactattgaaagaaatgggattctgtgagtggattgaaaggtagcctttggcaccaagtttattgggagtatatgtggtggattcaagtaaatgacttgtctggggccagttgtacccaagtgatcttcatgttacacgtcaaagcatggcaggtgaatgaaatgggaagagcacaaatgctgagtggactcatgctcttaagtctaaatactaatgctgaggacaatcgcggtggctcatgcttgtaatcctagcactttgggaggccatagtgggaggattgcttgagcaaattgatcatttgagcccaggagattgaggtttcagtaagtcatgatctcactactacactccagcctgggcaacagagaccctgtctcaaaaataataaaagaaataaattctggtgctgctaattaccgtataattttaaacaaattatgtgacttccctgagactcagtttcatctctcctctcctctcctcttcttttctgttctgttcttttcttttcttcttttgacagggtttctctctgtcacccaggctggagtgcagtagtgcactcatggctcactgcagccttgacctcctgggctcaagccatcttccttcctcagcctccctagtagctgggactacatgcgtgtgccaccacacctgagtaatgttttttagagacagggtttcgccatgttccccacactgctattgaactcctgggctcaagtgattcacccatctcagcctaccaaagcgttggaattgcaggcataagccaccatgcctggccccgagattcagtttctaggtctgaagaatgctatttattttaaacatatattgggaagtctaatgtgagaaaatgcatgtatatcatttagcacaactttgctttaagatggtcccttcatgtatggaagagagctagtgtgtggaaaagtgacatggctctaaaaagagaataaaagtcagagagtctctacatcttacttcaacaacgttggaaaatgcccttattgttggagaaggaaacgagtttatgattttagcctaagtgatgatgctgacagttctttgccaggaaatcactatgtcttttcaaaatattatatattctcagctaaggcttcattttacaggaactaatccaggaagtcttctatgaaatctctgaatgaaatgaacaattcagtttttaatttggcacctaaaaaagctagctgaaggaaaagaatgtctttgcagagacatttctgtcataatgagatagaatggtttcacttgggaatagcacactaatatgtattgattagattggaccagatctgggtggtccattggtggaatttagacccatggctcttacattctaccctcagttgtaactgacttacctgcttttatggtagaaaaaaacttctgggagcttagctaaatgattcttagctggaaaaatgccatttcaatttcagatgtttattggtcataacatgtgaacctctcctgccactgttggagagctacttttaattgaatgcaaattgtgttttcagatttctataaacatggcatttttcatgggttggtggctctgcccactgtggagaatgacaaacaaattatcatgcatcatatagcaataaaataataattcaaaaagaaaattgccctactcatattacctcatctttttggttggctggagagttacttacagatttttaggatactagagtgacttggtgcaagagttggggctcgtatattatagccattcataggtgcaagcaagttactgccttcacaatcagttcttttattctgtatatgaatatatcttctttttcttttttaaacaatactgcttgcgagtataatttatttcttcacttctgcctttgccctttctaaagtcattcactgtctatcattgcattccaccagtggaggagagaatctaaaaagttttgattaagctttgacctttcgtactggttgaaattaacgctttacagaattattcttttggaccataaaatatgtgtgtgcatgtgtgtgtatgtgtatgagatatagatatagatatagatatagatcattgatacttgcatcatactttacattttataaggcatattttcttattttgagtcatttatttatacaactcagtggcttagatttcatcccatggatgagggacttgacgttcagaaatctgtgacttgtcccaagtcaaagaacaaataggtagttctaaaaagaagagaaagtctactccttatctaaacagcacattttagggaagaatctgattggccctgattgcatcatgtctgaccctaaaatactgcatccagggagattaatgcctccagctgagtgggggctggggcacatatccactgctgtgtgtgttggggttagtgagggcagatgggctcagccccatgggaaccacatggtgtagaatcattacagagaggagagttctgtagcaaaagaagggaaaagtgagctagacaggaaaacaacaacacaatcattgacaactgataagcaaacaacyttagaaaaatcagaaaataggtattagtaacagaattttaaaggaaaattaaaaataggtgttgttgaaaattgtgtttcattgggcagacaaaactaagcaggatgagcaatctgaagaaaataataagctggaaaactgaatataattgcagtatcatttttttaaaagactcattagtacctatgagccattataattactcttaacagtgccctctttttaacccaggaaattctgcattttgaaagaaagtagaaaaacgtagacaaatgagttacagttttgaaattagaatgcatgggaagcattttgaaatctgtaaaatattctacctttgatgtcaaaagtcagagtacttgatatggatcctttaaaaaaaatccatgattgaggagattttgaaaaattcctagtttcttttaccagagtaattgtatgttgattagggtttgggtgttttttgttttcaatttggaaagaaaaagagcgtgcttagcccattccatataatattgtatagaaaactcaccaggtcttgttcaattgtgagataacactgattgaggttttatcagacttatagacatcaccatttaaacctaaacgaaataacaactccggtagttcatctgtgggcatcttccacttttctctgtcccactctgttataatgcacctcccatacaagctgtgaatacttaattcatttctttaataacttgctgtgtatacatagtttagctaatcatcaaaagtgttggaatgccacttttcattttatctcttagtctaccaaaggtcagcaaactctcaaaaaccaattaattgggtcactgtggcttatagcctagagctatgctcatctttattcaagtccataaccatctctgatttcaggtttggtgtttaggttgaatttatccatcaacgatgggctctttggtttgttctttgctgaggtattctagcactacctcttgagtgaataccaaactttaaagagctttttaagaaatgtcagaaggagagagcgagagagagaatgcctggctttgtgaaatgttgcagaaatttgtatttgtaattatcacaaatttaatcagtctttcctttaaatttttaaagcaattttggactattctcattatttcaatggtagggaaagtaacatatagatagggataggccaagtgacacttaaggtcaaatagcaagtgagtggtgaatgtaggtgaattaaaattggatggccctgtttttgctgtttgatccttagatcactgaaaactttccctctctttttttttttttcttttttcttttttttttttttcttgagacggagtctagctccgtcgtcaggctggagtgcagtggtgtgatctcggctcactgcaacctcggcctcccgggttcaagcgattcttttgcctcagcttcccaagtagctgggattacaggtgcgtgccaccacgcctggctaatttttgtattattagtagagatggggtttcaccatgttggccaggctggtcttgaactcctgacctcaagtgatctgcccaccttggcctcccaaagtgctgggattacaggtgttagccactgcgcttggccaaaactttccctctctttaatgaaaatgaatagataataaccaggtcctactatatttcagcatgaggctaggaaatgtgtatgcatatttcttgggaagtgggaggtgggaggtgtaatgattgggggagataaataggaaatagtccttgggctgaaggagttcgcagcaaagtaaaaagtttaattgtgattaattgtgcataatgacacgtaatcataatgggaagtaaaatatggcaagaggaagactttcaaattaagtttttttttttttttgtaatattccttaagatagaaaagccagccgggtgcggtggctcacacctgtaatcccagcactctgggaggcagaggcaggtggatcacaaggtcaggagatcgagaccatcctggctaacatggtgaaagcccatcgctactaaaaatacaaaaaattagctgggcatggtggcggttgcctgtagtcccagctactggggaggctgaggcaggagaatggcgtgaacctgggaggtggagtttgcagtgagccaaaatcgcgccactgccctccagcctgggcgacagagcaagactcatctcaaaaaagaaaaaaaaaaatagagaagccatttgtggttatgtaatttaaaagaaaattttggccaggtgtggtggctcatgcctgtaattccagcactttgggaggccaaggcgggcggatcacttgaagtcaggaatttgagaccagcctggccgacatggtgaaaccctgtctctactaaaaatacaaaaattagccaggcatggaggcacatgtctgtaatcccagccacttgggaggctgaggcaggagaattgcttgaacctgggagcggaggttgcagtgagctgagatcgcaccactgcactctggcctgggtgacagagcaacactctatctcaaaaaaataaaaataaaaaaggaaaagaaaatattattattattactatttttattattattattttactgttgtctgtctcctaaaatagcaaattgttgtttctacttcatatttataggtcattttactaagaaatcagaatcctgaaatttatctcattttaaaagatgatgacattctataatttaccgtcaagaataaaagattagtgatgattgaaggtgctggaaattaatttacactaaatagcattttgaaaatagtttggggaactttctgaaatataactagaaacttttagaaaaacatgactatagtatggtaagttgaatcattgttgatgagcagacacttatccttgatacagagatggatttgcaaaggctatgttacatatccgaggagatacttttgtttaggccatctggaaatgtgtgtatatgaaaaggttgcaattttatttttttaatagagaccaggtcttactatgttgcccagacaggtttcaaacttctgggctcaagtaatgctcccacctcagccccaaagtgctgggattatagacgtgagccaccatacccagcttgcaatttcctgaacttgttttattcattaagtaagactagttttgttttttaatttttattttttaaagacttgagttgatccaaagaagagagaagtggtaaattttaaaaaggatgcctagttataatcaaggaatccagtaaagtaaattaatctgttaaaattataaaacaaaaattttgcctgtatgatcattcctccctcaattttcttaaaattcatgtattaagagcagtgactaactgacaagaagcttctgtgccatttgataaagatttcaactacaaatgggaattaaggtatattaaaaaataaaattctgcatgacaaaatatttaaaatgttagtttttaatgttctacacaaatattgtcctacattttaacctagaaatctacgtattgaatcagcctataaaaatccatttctttcacaaataatgtagctttgagaacagatttttttcaataattctcagtctacaaagctatgaaaaggaagttgctgttgctgcattttttttaagctgtaaaatctaatatgccccagctctgatgaaatgtaccaggaggaacctgccttgtcaaacaggatatttttatgatgaaatgtgatacgaagaggcatagccttacatatatctgagagaaaattatttaagtggccataatagatttttcagaaattttgtacatttctcttatttgatccagatgcatttttttcctctgttgttctcataccagcttcttaatttcacctccctaatgttccacagcataaatacatctttgttcagagtttctccaagttatctgtgagaaaataaactatacaaagggtccctgggtatgttttaggatacatagattatgggggtgggagagttaccttgtgtgtgcaaatgagactgtatgtgaaacgaagataaggtttggagggaaatagatgattcaaagatacctaagaggtttattaagacctttaaaaatgattttacagtgcctgtaaagaggactgatatttaaactcattcagcttagtgaaaaaaatgaagaaaaatggaaagtaacatgcactacatgtgtacacacagaaacaagtataataaaactttctgccctttttttttttttttttgatatgaagtctcgctctgtcacccaggctggagtgcagtggcatgatctcggctcactgcaacctctgcctacccggttcaagcgattctcctgcctcagtctcctgagcagctgggattacaggtgtgcaccaccacacctggctaatattttgtatttttggtagacacagggttccaccatgttggccaggctggtctcaaactcctgacctcaagtgatccacccgccttggcctcccaaagggctggtattacaggcatgaaccaccacgcccagcccctgcttattttttaaggtttctagaacattggctgtgaacttttgggtaaatagtgcacataactcttctccttcctttttatttgaagtgcagacctgggtatattttattaaaataatggtctgaaattataaaaaatgttctttgtccaatcaaggagtaaaatcaaaccttgtattattttgtagttatactcagatgttagactatcttctagtccccagcagttcactctaggtggtcccatagctcttgcttgaaccacagtcttgccacttcttatccatagtgatgtgcacatcagttcccacaccagaatgtaaaatactagagggaagaattttggttgatttgtgtttctattcccataacttattactatgccagttcccagggagtatttattaaatggatgtcaatatcaacagtgagttaatgaatttttttgttggattatcattttttaagttgtacacatttacaatgaaaagaaaaccaccttcactttaaatcatgggcacagatatttaagtattttaaaatcaaagttttaaaaaactaacattggcttaaataatatttattagagaacttgtaacattttaagaagcattcacattctacctatgtatattttaaatttatttctgttttttacatctggaagatttttttcattttatcataaatacttgttttcatggtaatttataaaaatcagtttctcctttgataggattattacaaattatttcagaatctacttattaactggtcgctgttcctctctgtagtgctgaagaggcacttgcttgggaacaagagaagtgccgcaacagtgtcaataacatggatttttcatttattatctttaataataataatagatgacaataatatattttaataagcatctactatgtgtcagatgctttcttctgagaatggatattgttagtcccattatgtagatgtagagactgatactcaagacaattcaatatttgtcaagtagtggtagaagcaggatttaacctcagtctttctgactcttcatcctgtgttcttttcacccacagatggtagaggttgaaggctcagaagaacactttttgagctcagaaagctcttcttgtgacctctatgctactagtctaaagggcaaatgataattgcagctactttcagaaatggtcctttttccctaatgagatgaccaaatctgctttatgaacccagtttcctaagcaagatacagaaatagacacaccaatttagtatgataaaaggtgttaaaggtagaacaattttaggtaccaaattatatttatttgatacttggataatttaaaaataatgccacaaacttcatcccatctacctcccagtgcgcacacatttgggatgaagagataatgatgagaatgacattgtagataaaaggtatatgcattaaacatctgaaatgcttaggttattcaaagaaaagaataaacacaccatgtgatatgtagcctcagctacttcatgtttgaagttgatggtaacattcagatcagttttgagaagcagactgcaaccatagcttttagtttaagtttcagattgatatggaaggttatttgttttaacaatccctatgttaagttttcttttttctatgtttcaattgacttattttgtcagattttaggtttttttttttttttcaggcaagatggcattctcatccctgctgttgttaacatttaaagcatgcagcctcttgtgctgtggtgtaaattccaactgactgacgataattaaacagaaaatgaaacttgaatggcactatctcaaaatctacttaaagccacaacaggtatctgcctatagcaatatatcagttggaacacatgaagaataagaaattgtagcattttgtgtctgggtttatttttctttgaaatcaaagaagaaaaatactgatttttcctggatcactaaaacagtagtatggatttctaaacagggcagaccatacaaacacacaattaattatatctgaacttgaaatctcatactgtgcactttacctcttttataccagttgtaatttctcatttatgtacagatactgtagtaactttttttaaaaaaaagaatgtattattgtaattaaaaagcaaatactcaagaaagataagacacaaaggattaattgggattacaactcttctttctgtattgagtgcaaaagcttggtgatctcctgaattgtgcttcaacagtgacctcaaggctccttccaacccccaaggctctccttttttaacatttgttattacttagctattttatttggcagggatcccttctatctcatcttctaatgcactggcaatgatcctattgccaatagcttagagcctactgctgctggggtaagcgacacagccgaactttctagcctctgcatccttataaataatgcatctggtttcctgtaactacatgaactcttagactttagtaggcatttctttgttagtcagggtaaaagagttgggagatgaacagttgtggaaatagttataggcagttattatcactgattagaacctgagtccatgacatatgcattaatcactgggttaatgctaatggaatgcttatggtatttatagtagatataaataagatatagaaaaagaatatctttgctgaccaaactgcatgcttaattcaacatggaaagttctggtgaggttaatctaggacgctttgagactccgttgctcataattggacctgatttactactcatttaaaaaatctcttttaatttgcgcagaattcgctggctttttgggggtggacacacttgttcttaagaacaatagcaacaagatctttgtttaacataatatctaatgctccatgtaacttagtggtataacaaattattcaatttgtaatgaaaaaggtaaatgctgtgttaataagttaatagcaaagtaaataatgcatatttatacttttgacttcaaagtgtttataaacttatggcattaaaaagtaatgttttatttttgagcatcagagaaaatagtatttaaacaagagaaaccgatttttaaagtgaaaatcattttagcaacattttaaaataagccacgttaatataaaataagtgagttccatcgaagtatacactcttttcttcactagacgtgccttaattggacatgtcactggccaggcgtggtggctcacacctgtaatcccagcactttgggaggccaaggcgggcggatcacctgaggtcaggagttcgagaccagcctcaacatggagaaaccccgtctctactacaaatacaaaattagccgggcgtggtggtgcatgcctgtaatcccagctactcgggaggctgaggcaggagaattgcttgaacctgggaggcagaggttgcggtgagctgagatcacgccattgcactccagcctgggcaacaagagcaaaactccatctcaaaaaaaaaaaaaaaaaatggacatgtcacacagtgacaatgttcagtgttatgattctatcataaggataaaaaattcagattgatttagatgttgatgagaaacttgttgctctagagccttgtatattttcatcagaattaactgaaagaagggaaaattgtttctaatatgatacaggatgttcatcctgatcattttattattgatttctttagttaccatcagttcatctctgagcagctcattcatttagaaagatgatagcttgtaagtttaattctaaaactcattctcatccttgttagcatttgacatgccaatgattttgcagagctgggttgttatcaggactcatgtttagtcaaaatgtttaacacttatttctttgattcctgtagaatttccttattaattaacccagggtctataagcaacaaatttttaaatcagatatatatctatatgcatgtaattcatttttttctctttgatttttgactacttttttatgctgatattttagaatttctatgaaattaacacatttccttaacaattcaggaaatctgactaactgtactttaaaattgtgctttggtatcaccagtaaataagaaggcttcaattcatcaaaaagataataataaactgtattaatgctttcttttatttatttattttaatccatctaccaaaaacaatcaagacaacagctttaaaaaaatgcaatcattaaattactacgacagcctagtctgcttttgtggctgttttgttttgatggttaccgagaatggaaacagacagattatgtttttctgcttgtaattgtccagtacctccaaaggcctcttgcctgggcatgatcccttctggaattgaattctgcattcttcttctatcactaatcaaacaaaacactatcagaagaaaacatttccataactggatccggagtgaaggaaaatttcagatacttagacatgcatatacaataaacagtgtttcctgacaggctcattaaaaaagaatgactccactatgtgtcaactgcacaaatagaatccattataagactatggactcttacttctgaagtctgcctttgtgcccacctaagattaggaaaactaaatcttccactagaatttaaatatcacagaagcagaaacgattgcaatctctttccccagtgccttccttcctctttctctcagtcttgggtaggtcctggtacatatgaggcacttgcttaaaaaaataactgaaggaacgaatgaagttgcttaaggccgggagcagtagtctgtagatgagtcgactctcacctgtagtcccagtactttgggaggctgaggcaggaggatcgcttgaggccaggagttcgagactagcctgggcaacattgtgagatcccatctttacaaagaaattttaaaaattagccaggtgttgtgacatgtacctgtagtcccagccaattgggaggctgaaacagtaggatcacttgagcccaggagtttgaggctgagcaagatcttgtcttaaaaaaaaaaaaaaaaaaaggttgcataaagcagcagagacaggatcaacctagaatgtctgtggaaaaactttgaaaaagcatacattcttaaaaataaatgggaaatctgtggcagaggaaacagtaactactgacctgatcttcccttttcattttattttaatttctaatttgctgtaattgtatggtgctttcaaatactgattaaaactcttaaaaaaatgaaagagagaaatcacatttttctgctaaactgagtttgtggcatgccttcttccttcatcttgttgatgctcaaagaattatgcaacagagggccatcatactgtttagtatgttaaattattttgattcatgtacttactagcaacatcatttaaatggtttggtttcgtcatggccagacttaagacacatagcataattaagttgacaacctaatattccacattaaatcctggtgttggaaaaagctaaactgatcggagaaataaatctgtccaaagtagaaactgtaatatgtatgtgaacatgtatattctcatcatcactttttgttttcttcttttgttctctgttcctcctgttgagtcttgtgtaagtccaaataaaaattttattgtagagcccaacaacaaaaacaatgatctcttatgtaattgatgattttaaaaaatgctttgaaagtcttcttccatactttgtatcagtataaagatattgtacagtggtacagaaaaaaatggcttttgaagttcagatggtttgaatctttgcttcaccacttactagctatgtaattgtgggttatctgtgcatctttttaaattctcactttttccatctgtaaaataagaacaatatcagttactttgcatactgattgtaaagattataaataagaactgatgtatatatattacttggcacaatgtctgacctgtttctgtttttcacagtcaggcttctcttccattttctaaggtgactcggaccttaccactctaaaaattcaaatcatgccttcactttctgcagattgcacttgttactttagaagaaaaggaaaactataagatggaaattattttaatgtcctcttaccaaatctacaaaccccagcacaatgcctgtcacagatacggtcatttagtaaacatcttttggatggataggtggatgggtagctaagtaaattaacatacagattaggtctttggaaatggtagctatttttattacaccctgtacagtgaccttaaaatttgaaatctactgcttttgaaaagcaggtcatcctgaggttttccattttgtacctgccagattgtgaaaagaagttcatttcaatgctgcacagcacatttcctgatcagttggctgaattacagtcatgccatttcattttgagttggacaattcaagcatttagccctgatttttttttttgacagtaagttagttatttttatactcattcaacacatttttcccccaccacaggttattgtaaaaccacctgtctctgggagcacagttaattctgtgcatgagatttctaaaaatgttttacattgtcattgcagttttttaaaaatgtagagatccctctgctattcttttgcattgccaaatgcttaggtaccttggaaaactgcttaattggttcttcttatctcactagattctttggccttaggttgtgaatgggtaacaatcatttaacttttgatgtgccctgaagtttccatccaaaacttttttctttgaatcttttttagggtgaaagagaagaatatgggggatctaggtgtacattgatactttttagatgcctttgatgtcagtcagtaaacagcagtagacatttggaagagcatgatagaagagacagggctaattccaggtatttaaccccaagttaaggagacttaacctgaggctgggttatttctctgatctctagggacagagtagtggcaaagccttaaggtggtaaaatttttgagaaacacttctaaagacttatgttttgttttagaatcctatctaaaagcatttcaaacaaattaagttaagccgttcctttcttactggatgtgttcgggcgcagggggtgggggcaaaaagaagcatatggttgaagctctgcactgcagtaatttgtaaaagaagtacttttcctgctaggttaaattgctctgcctgcctcttgctgtcagggacatgatttagttaaatacggatgcttttagaggggctttgtactgcatcatacatatttaatagtttataaaatatctgtgtgaatcactgggtggagaatccagcagcagagaagctcaaccttcacattggagcctctggccttagggtccactgaccagttgaccactggaaaaggtgtgttcagaatgggagcgtcctgaataacccaaggattctactgatttcaacagaataagcttagcatctaacctttcagattttttcagtaatgtgaactttacattttctcaagtcacattattcatagatgttctaattccccagggatcgaagtatagcattaaggaaaatcccttctcaataaaaaaatggtattgggtgaggggagggggacagaaaaagctcttagatgttctatagcaattaatggttgccatataaagatacctcattgtcattagataatggttaaaattatatgaatcttttacccttgatataattttgaaattcatcttaaaaatcaattccttaaaataaaagtagtaggggaaagaggtagtgatgggtggaggctgggggatgatgcagagaaggaaaaaaataagcaagtggaggttactaaatgtagcattggtggattattttgtttgtttggcataggtaatgagttttataataaaacttactatagtatatcaagataggctcctttcatatatgaacccagaaacaccatgaaaaattttttaaaaagttccagcattttattatgaaattttcaaacatagagaaaaggtgaattaatcattcagtaaacaaacttatgcccactaccaagattttacagttaatattttcctatatttgcttactgagtgtctacccatttatctatcaactttttatttttgatgaaatttcctgtatatatgagttcattttacccccaaatatcccagcatgcatagtatatatattttattacattgtttaagagaacatgtaggtcatggattatgctatcaaatagaatatatgtttctctcaaataagccaccatatttggaccgagggttttctagtcatcatatttcagagtataactcagacagtagcagccttcttgttcctgttccctaataattactccttcccctgtcccaggcttttaattctccaaattaaaagaggatgtaacctcggcttcctgattcccagatactgataatttttggtacagtttgtgtttgagctactgcagtaatgttcgggcgattcccattttggtgacagtcttctttcctgaggatacattgccttcctatcctctgtagtttctttattctatactttcctatgtaagcaataaagctaattgtaatgctcccacaattcaggtagcgtctaatctccagcctgttctcaggggaagttgttgggttctggagcacacattttgtgtgctcccttagtttgacaaaatgctgtttaataacagagtccaaatatgaatattagtctctgaatatctttcagaaagaggcccattaagtagagttgtgaccacaagtggtcgtgggagcattaaagagtaaactttcaagtagaaatggtccagggaaacagtcaaagtgaggtattggtacagacatcattcatggctctaggcgagagaaagtctaaactatctaatcaagtgtgtgtatctgagttggcagtatgcaactaaaagctttcctttgtagaaattaattaaaaagaaggagaaatagatgtgattcccagtcctgactttgaaattaatttctgtgtgactctaagcaggttttttgtttgtttgtttttacctcccaataactttttttcttcttgtataaaataaaattcatgtaatgggtgcagcaaactaacatggcacatgtatacctgtgtaacaaacctgcacgttgtgcacatgtaccctagaacttaaagtataataaaaaaattaaataaataaaattcatgggtaaggcctgttgcagctccaacattcagtcaataaaaaaaatttaaatctaattattattgagattacagttgacctttgcattaaacctaaattcttttactccaaataactactgaaatagaaagaaaagacacaagtctattttcttttttctcccagtgtcttagagatatggtctccttctgttgcctaggctggtctcggactcctggcctcaggcaatcctcctgcctcatcctccctagtagttgggatcacgggcaggagcgaccatgttggacagaaaagaaacaagtcattcttaaacaaatctgactctagcaacctattgtataatttatggtagaaacatttgagctggaggtcaaatcataagatatttttatcttataactttcaaattcatatcgttttaagtaataaaaattgtaacaattttctgtaaacagaaaaggtttccaccccttgagctgaaaagcagcaggaaaaggagattggcatttcattttaaatgggatacgtctgcttccatgagcatcataaaggttatgaccttacggtagtgttgcctgacaggtggctcactaagaatgccaaatcagttctggaaactgcatatacttttatttcttcttttttttttgttccctttggtgcaactttgtattttcattttgatcagcaacaaggagaaaaaaaatgtgtgtactctaaggaaaacgtatattgtaagacattttctctggctaaggtcttttcaggtttagaaatgtgaactggccaggcgtggtggctcatgcctataatcctagcactttgggaggccgaggtgggcggatcacctgaggtcaggagttggagaccagcctggccaacatggagaaacctcatctgtactaaaaatacaaaaattagccaggtgtggtggtgcatgcctgtaatcccagctacctaggaagccaagacaggagaatcactggaacctgggaggtggaggctgcagtgaggtgagatcgcgccactgcactccagcctaagcgacagagcaagattccatttcaaaataaataaataaatataaaagagaaaagaaatttgaaccatgtttaaaagtagaatacttcaggtaatccctttcctcaagctttctttattctgggaatgttgtgcaagtatattttatacatgggcttatgtgaagtttcagtctcttgaatagctggtactctcttatgagtaattcataactgccttcacatgtgtataatctcatgctcaactgtttctctctattttaagcaggagatttaaaaatcaaattaacacatatttctagagcatttgctataagtgatatgctgtgctatatactgactaactacatttctgggttgattgggggaccagtttatagaattggctgacaagcaactgaactttaaaacaaatagctagtgcttaagtataagtcaagttcaatcactcccatttttaaaactttgctgaatttatattaaaccgacattggttattcaaggtatttcttccttgtttttagctaaaacttctcttactgcattaaactacatccattatcattttcattaaataagattgcacattggatatgtacataaaagcaaaattatatcttgcatttttgttacatttgccagaagaatgaaaaacaaacaacagaaaatttctctgagctgtgctgctctatgccctgaacgtaactgtaatagtgaatattaatgagacacagcaaagatatttgctcaaggtagctaagccaatatgtattgctccagtaaatgttagaaatgaccattcatccacataacctcagattagtctgcataaagataatgtttcttttgttttttcttctttttgtcacacacacacacacacacacacacacacgcacgcacacacaccacacagtaatttaacattatttgcatttactcacactggtaaaacacacgtctcaaagatgtttcccatagtttattcatccctcttctatgtcgttttcatttggatgcatttgcttaacaatgtctgctgtgtgccaggcatgctctaggtactggggatatagcagtggacgcagacacaagtgcatggtcttatggagctgacattctggtattgagtttatcacgtttgataagaaaacacagataatacaggaagactgccatttgcccctcatccttggcacttatttccagtggagtccttcatcccaaagatctcagacccgcacacacacacacacacacacacacacacacacacacacacagaaactagtaaatggatatgtcattgagactctgaattcaaaaggcttctgagaacatgagcaaaggcttatctttctatcccattttatatactaaaatattatttttctgttcaactccatcctatttccctatttaaaatatacatatcggcaggcgtggtggctcacgactgtaataccagcactttgggaggctgtggtgggaggattgttgaggccaggagtttgaggctatggtgagttatgattgcaccattgcattctagcctgggtatgaaagtgagaccctgcctctacaaaataataataataatagttcaaaaataagttagccaggcatggtggcatgcacctgtagtctcagctacttgagaggctaaggtgggaggattgcttgagcccaggatatcaaggctgcagtgactaggattgcaccactgcactccagcctgggagagagagtgaaaccccgtctctaaatatatacatatatatatataaatatatttttatatatgtaaattaatatcaagttcagagttcatagttaataattgcctgagattcactgccatattgcctattgatactttctagaagaaagggtagccgacacataacaaagtctcatttttccttgagttgaaattcacacagcaaaattaaccatttgaaagtcaacaactcagttgcatttattgcactgttgtgcaaccaccccttccatctagttccaaaacctctccagtggaattttaaaagaaggacaacttgtaaaatgaccaataaactgtgtttgtagaaaattaatgattttacttatggagagtgagaaattaataggttctcccaaagtaaagcaaactcactgtaactatcgtatgcaattaaaatatctttccatatgaaattctcacatcctcatctttgagatcatttactgtatcttcagttacagaggatctaaactcataaagaacaaaatgtaccagagtaaattgctcatcgtgttacagaatgagaacacagagcacagtcaatatcaagtacttgatacagcatctcacaaagtaatgcttaaaattaagtcaaattgtctgctctgagaacattttcactgggtaagaataatcagtcttgactcacctttaaagtgggcagaaaagacatgcccaggaaggtaaaatgagtttcattcatctcacctattttgcatcataaataatgtacaagaacatcacacagcacatggatttggtttgctctcagagaacttttctatttagctggggagagaggaatgacaagaaaaaatagttaaatattagcatattccaaattttccctccactgataggatctgtggtagttgagtttcgctagatcaggctaaattaattcaaggcatactttggaacaatcagagaaaatttgataaggaagtatctgaataggccattaaaagacttgaaaaaatggagaggaggagtatagagggtattttagatagttggctatgaataaagcctgctgatttattagagaccccataatctgtgtaatgcaatcccaatccaaagtaaaaccaaacaaaatgtatgtattgaatggacagcccagctctaagtttgggacaatcaaatactgatagtctttgccttcaaataaattgcattcttcagccctgtatacacgatgtaattaaatgatgacacatgactgtgaacatgtaccccaataaatggtacagttaagaaatgctgggtctatgatttggaaaaatgggaagggcttcgtcaaggagctgagacctagctgagggcatgttttttggataggtggaagaagctgacagatccattggtgtactttatcctccagagaagctgcaagttttgaaagtcaacttcaggacatggagctttcttgtgaaaattatgatttcataattcctcagcaaataaataaataattgccatttgtatgtagggatctctccaaatgaaacgactgctgccatcatttttattttatgttagataccatgaagtaaattctactcttttgccagccgtaaaatttaggagcaagaataaactttttcagtgataatatttttagattttggagataatatttttagagttatattgccaagatacaggaaaaaagtcaaagagaaaataagtgagtaataaggtcaaaagcaaaatgtcatttatcattctctttcatctgttggagctaccgtacattcttctgatgataaagtaaataaaagtaaagcagaatgactagcttgaattcatagcctagcttgaattgatgtagctgaggaattctagtattttttatttgatgatattacaggatgtttttcttcattgaagccagcttagaaggaagctgaaatattatgaaagtggatcagaaatacaaatatattttactttattctgccaaatcccattctatattaccgtgtctcttcttgatccaggttggcatactagcatttacttccttatcctctgtggcagattaattgtggctgcaaattctttgccactttctccctcaagatttatttcttctgtccttgagtctgggctggcacggtgactgcttaaccaataggatgcagtggaaatagtttgttctgctttcaggcacagacttttaagagaactggcagcttgtgttttcttcttcttggggtgctttctctcacaacctggccaccatgctgtgggaagctcaagccacaaggagaggccacaggttggtgcaccatttcacagtgccggctggcatctagcagcagctgccggtcgtcatgtgggggagccatcttgaacgtttccacctagttgcacctcacctgcagcaccagctgacgtcaaatgaagcggaagaaccactcagctgaacccagtaaacctacagaataaaatggcggttgttgtaagctatttccaggtggtttgtttcacagcaatacataactgaaatcgcttcccaaggaaagtcctggaatgagaccatggaagagctcatttgatttaaatgataaatagacagtatttaaatggcctatgcttaattcttataatttctaaaaattattaggcaaaattgtagaagtcttattttggaaactagatccttttaagtttgtttacaaattatattaaggtaataattcctatttcattgttacatattctggttctcatagtctctccttgaagtggtatgtaatcaataatataatcaaatgcacccttttgatgaaataacaaaagcagtatttttcagcagaaataggatgaatcagaacgtactcaaatcttggccacatagctatgtgtccatggcaaaattacctaagctgcctgggccaatgaaataaaaaaaaaatttaagataaatatggactgtatgggattagtgaagatcagaaataatgtatattatgaacctagcagagtgcctgtcacctgggtggaactcaacaaaggtagcttttattattgtgagggagatggtgataaaaggttaggtagtaaaaaattgtgtagtttatttttctaagaggacatggaaatggggtgttcctgggctttactggggtggagcttaaagggttaaaatgatatatccttgcagtttttcctacaaacatgcatgttttatccaaaggaaattctgacctctaaccccattcacactttcctttcttactcttttattgctatagaggatttgatgaaggcagaaaggcaacttctgggtcctagtcccaagggtagaactaatggagaattcttttattcttcacctcccatccttctccatttccccatttacattctttttccaatttggcggaaaaaaagcaatgttataggaagctggctgtctgcagattagtcttagcaccaaggtggaatgacttttgggggaaaaacagacacatcccaaagtctggctcatgtagtccaagggaaagagtacttgtggcagtccataggattctctctctgatgtgttgtcctagtctttgtataaaatgttggttttctctgtaagtgttgggtattttcagtgtaacagctagagcaatgcccagtaacttttttttttttttctgctgaatatgtttgctcttaatggttgaggtaaggtgaataattgctcttggtgtaagttaaagaccacttttctaaactatgggttatcatgcttggtattttctcctatctgcctgacttgaggccacctgaaccccattttggtctttgaaatttagctgaccttggccttggatgaaatgctggtgtattgagtataatagttttggtttaggtcaaaattggggaattcagtgccgtatatttcaactgggtgctttttgaagaaatcataaattaccctagtttagcataaacacctgctgatattgtttctgaatatttacatgaatattgatcattgagatcttactatctttcaatttgaatgctttaaatgcttcaatagatgttttctacaccgtgaaattgtatgtcctttgctagaatctttgtaagagaggtctcactgctttgaagtcaaataaacctagaaaataagcataggaattatttttaaacaccatttactgtgcagattatagagagatgaactcaaggataactcatgttgctcataaacttgtcatagtcatggttacatttatgcaaattggcacaggcttttgttgttgttagttatagtactgcaaacacagtttaagatgttaagaccctttaaatcatgtataattatggactaatttcatcttgaaggaagaagtgataatattcttatctcctgccgtttaaagctgaaacatacctcaaagtagtggagattgtgccctacaaaatataatgtgcttaaagcggattttctcaggacttgaattctaaattttactgcttcagggactcatatgatggctatgtagtatagatttagagagagttttacagactcctattgacataagtgaacaaaatggttccttggaaaccgtttagatgtccaatcacagtaagtgtggattacaggttcagatgcatattgtgtgcagtgatgtgcagcacagtgcttggggaagcctgtggtctgtattaagaacagtgcatttcttctagtgttttaatgactgttgttttaaaagaaaaaaacagtcagcattgaaactactgaaaggtaaagctcctgaaacctaacccaaaaggcatgctctcatagaaaactcttcttagtactttcagtgcggtgatagctgaggacatgtggtatatattacagtgccagggaatccaaacctctgcagtgtggagtcaccatgaaaggctaatctaaaaatgaagtggtagctttgctcgcatcataactctgttacttactggtgcttcctattagcttgacattattagtcttctttgggtgagatagaataaatggaaattcaaaggggaccacagcaggggatatatgggctgccaacccctcccctagcactcccttcctccagcctgtactcagcatttctccctgggcatgacaaacaaagtcttacatagtcattgcaaaaagggctaaaggcagagctgtccatggttaggaaaaaaatgttcaaactgttggttgaaaatcaggtaataacagtcctcttagtgaacaaaacttattagagggctagggaaggaatgctatctctcagcagcaggcaggaagaaattgctgttgaaaagcttacctctctagggaggaatcagatagcagacttcaagcctcaggtccaacccataaggtcccacctacaccaccccccaccccatccccatcccagctttgttagattgctagcatcgatcgctggctttctctgacccaacagtgggtgaaggaaagagactgaaagctggcaaggtgggggtggaagaagactgggacagcttttgtagagaaagaaagaaaaaggaggaaaacgggtgggggccatggggactaggcttaactgatgcctgcctgcctctctttgatttgatggcctttattccttctaattggataaaataggaagtcactggcagtcctgtgtggctggggatactgattttactcagaccagcctgcagctctagagtgtgggtagagagcggggagtgggggttgggagagggggaggaaagagagagaggagagaggacgggcttggatgaagaagggaaagaaagagaaagagactgaagcagagaagagccgcagaggaagaaagtgaatgagcactcaagaaggacaaagaggagtagtcgggggtggggtggaggcagggcggggaagggagtgaccgcccctcctggctgcactmttgcctccggagccctctgatcctgtttgcagtgatgctccgagggcaggcacctgctgctctgtaatgattcagcccctttcagccgtcgtcgcgttaacacaacaggatgctgttgctattgtcactactgcctctcctgccgccgctgctgctgccgccgccgccaccgccgctggtcctccttctgcttttacttctcctgcatgacagttgttttcttcatctgagcagacaccagcttcagatgctcgaggtgagaaacatgcctttcagtttgggctactggtttacttaattaatcagccggcagctccgtcgatctattttcgtccctgtcctcttgacgagcccgggatggtttggagtagcatttaaaagaactagaaaagtggcccagaaacagcagcttaaagaattattacgatatactttgattttgtagttgctaggagcttttcttccccccttgcatctttctgaactcttcttgattttaataatggccttggacttggacgatttatcgatttccccctgtaagatgctgtatcatttggttgggggggcctctgcgtggtaatggaccgtgagagcggccaggccttcttctggaggtgagccgatggagatttattccccagacatgtctgaggtcgccgccgagaggtcctccagcccctccactcagctgagtgcagacccatctcttgatgggcttccggcagcagaagacatgccagagccccagactgaagatgggagaacccctggactcgtgggcctggccgtgccctgctgtgcgtgcctagaagctgagcgcctgagaggttgcctcaactcagagaaaatctgcattgtccccatcctggcttgcctggtcagcctctgcctctgcatcgccggcctcaagtgggtatttgtggacaagatctttgaatatgactctcctactcaccttgaccctggggggttaggccaggaccctattatttctctggacgcaactgctgcctcagctgtgtgggtgtcgtctgaggcatacacttcacctgtctctagggctcaatctgaaagtgaggttcaagttacagtgcaaggtgacaaggctgttgtctcctttgaaccatcagcggcaccgacaccgaagaatcgtatttttgccttttctttcttgccgtccactgcgccatccttcccttcacccacccggaaccctgaggtgagaacgcccaagtcagcaactcagccacaaacaacagaaactaatctccaaactgctcctaaactttgtaagtagagagagagagagagacgatgatgatgatgaataaaaggggtgggtttgaggtccccaaaggacatttccctttcttcttgcattttagttgcctggttttgtttaagcaaagcctatgtttgagatgcttgggatggcattgaagggccgagtaaaatgatcttgcaaactccggatctgaaccagtgttgtaacagcagctctctctagccacatggctcaatctggtaccgggaatgaaaaacttcagcatctgcaagtcatgcttgaatttaagttaaattcaatttatttctaacacattttaaaattaaaacatcacgccatctcttatgttttatagaaatgtgactttcatataccagtgagtattatttkgtgtctttctcttccccatcatagatttcctgtcatctctctgttaccctctacctctcagcgaccccaagctgcctgtwgtctctctctccttcccgttccctaaccacttctccctacttttgtatcttaattggttctttgagattacagcaagtcttaagacatttacggtgctagcctctcactagcttgagacgactgctgtcctgcccagatggcactttcagttagtgagcacttactagtggcagctttattttgtccaggacacagtaggattctgcatgaaggattttcccaaattagttttgtcttctataatcaaatgtttaaatagcttccttggcagttgttaaaaagtacaagatccattagtgaggtacatctttttttttttttttttttttgatgtatgtcatcttagtctggcagattgcagcggcccagtttaataacctgtgatgtgcaragagcccacgctcttaaaaacaatacattcctgtttgcattgmgtaattgcaatagctttagagtggaaagttgacaggaatgaaagcatgactgttctaaatatcaatatagaagggaggagttttctgtagccttttaaaaatgtttctagtttatttttgttgtctctatctcctatcactttttaccatgaggaatatttacttagtagaaaagtacaagatcagaaaatttggttcttaataacttgcatgaaagctcttagggttaaaagagagttgacaatttctctgacgaaatgcctcttgtttttcctctggacagtaatgaagaataaagaataccttttccagacatcatgttcagtgtgaagtagtgcagcatgctgtaraaacacagaaaaacttgatttgtgcttgtaactcccgatcatttcacgaacaccagattcagtggcaaagatttaaagaaaaaaaaagtcttgttttctaggtgcaattagggaaaacctccttcatgcagacgctgctttgtatctttatcaaatccctgaagcatcattaaaggtctgacagacatcactgcctttgctgcctcttcccacctggcaaagtgactgggaaataatacccagatgaaatgacaggctataaaaagcaagtacagatcctgcaaaaagaagcgaaattcaccaggaggacaaggttacttgatcattttaaacttgtctttaattgaaatctgcttgaacaggtttcattgtccagagaaaraaaaaaatgccctttgaaaaacacttcaactaaattctataattttgtcatctgaggaaatcaggaaaacaaagaaacwtctaacacattttcctgatctaagaccatgtcagaaagtatgttgtgaagttttgataaattattttataaagtaaatttttctactaagtgttttagtagattacatattccttatcagtttttttttccccaagccagggcattgatattgtggcatctgcaataaatgggaaagatttactgctgcctaaaagcatcattgtggccagtttgaccagatgcacagctgcaacgttttgaagtgcatcggagataagcctagagaagcagtctgggaagtagttttctcctgaaaagttaggggtagacagttagttggttaagactttgaaacctataaggaaactctgttaattttttagactagttccttaaaaaaacatcaaatcttgtattgtaaaaattgtgagactactttttttgggggtggggagaggttgttgtggggagagtagtgtttgaaagggattggtccaggcagctttgtttttagagacttgtaagtggttgtttttgttgttgtttaaaaaggttgtaaccactaattaatggaaagcaaaaaaaaaaaaaaaaaaaaaaaaaagcttacaaagggattgtatttttcaactaaraaagtattgtttagtcacagaaagaactgggacgttccttttcccgtgcatgtttttgacataaactaagctgtcatggcttatatttgaaaatgacattatcatatgtgaaacatgctcttcagtggttttaggactttattctcccgtttccatttttttttctgtctcascatattcagcacattatgcacagagctgtagccttcaaggtcwtagactgttgaaggctaattgattcttctttatcctggagcctgagagagtagaagagagacaatcccagtaattgtgtctgcagcgttgctccccaaaccaatctaccwactaatgttagagttttattttataaatactagaattactccctcactgactcttgtcaaattacaacattctttgtctttgttataataaaaggcaaaatatgacattttaaattgccttaaggtatagtggctatgtcgaattttctaaaatgggtatttctttcataaagtaatatttcatattttcatgatattaatctatgcattcatgtaggtcttaagaagtccaatgcagaattggaatgaaagtatataagtatatatttttattctaaagtatttctaaatatggttaatggtttcccactaccacaatgattatattgtcatgatactaattaagtttttacttctcaatgagtcacataatacttgcactattcatttgttttgtctgggctttaaaatttttcctaccctgactgttgggagattgcaaacttagattatcataaaaagagctgattaattaaattatagccaggaaacagtggtaccatcttgaaagaaaatgttttctggatatgagatcctccctgcttgacaacagattcttggatgcaagaatgtgttggtattttcatcttgggcyaactttgttttgctttgtcctaagtcttattatgggattgtatgacaaaccattgttaccgcagtgacaataagaatcagtaaccatttgcaaaagatcaacatgatgagttggatataccataggatttctttccttctatttgaaagtgccgttcatttaaattctaatgcatccttcttctagttcttggtaactatgtttgtaggtatttcagaacagtgattttaaataacttctccccactttaatcatagccgattacagcctaaaatattaaaaactggaagagactgaaagatcttctattggaactgaataatttcataaatttaccaatgaagaaacccaggctcagaaatgcctattgaaattcttttattaaaatatactaaactctgaaaaatgtggcaaaatccaaagtattagaaaatgtctctgtctctgagaatttaaacacacacactctctctctctactgttttcttctatcatcgtatccttactgtagagagttggagctagagacgaatgtagcatcagactgagaattagggaagtactttaagtgggaccactgttcaggtgtgtgtttagtgcatatcactaaaattaaattttcttctcgccttcctgttttgctcttattaaattttcagtcgtggtggtcttttccctttttattagatcatccatactttgttcagcttgcttctgaaaacagcatgggttgcctagggtgagttcttccctcatatatagcagattgctctgtggctcacttcttttcttcataacccattttgttttctcctctctattcttttgtgatacccaactcagacttcttctcccctttccttcctaccttcccaattatgtatwgactcttttttatttttgtaattatgtcattttggctttataggtcagtatttcattgcatcatatcaaaataatttcaactrtctttaatgaaactttattgcattttaatgctgaatggcactttcatatattacaaacatacaaaaaaaatctctagccaatgaccaatataccagtttcttaatgacataattaaatcaaatttttaccttcttcttgatcttttcctcttttttttctttagtgtgcttgattccagtttttctgtttttggacatcagcatttctgtactcccagaaaacgatgttccaaaccatacatctgtgttcttcctccttccctcttccttttaacaactcttcatagtatccttttaaagtatgaaggaagaggtattttatagattgaaaaaccaaagcataaaaagttatgacttgtttagatgcccctgagaaccaggaatataacttgtccacagagtccattgaacgttctactacagcataaactacattccgtctacttttatgctcatgtttctacttttattacttttgctctacatcaatgctttgtttttcttctattatttcctctttggtttttttttgtttgtttgtttgtttgtttgtttttcattcagtgaaygtacgctaagtgcctactctgtgccagactctgttctagaccggttatatgacagtggaaaacagtagagtgcctgccctcagggagcttatgttctagtggattttaagaatctaattgcataatgcaatttgagatatttcttgctttcttatacatataccctcttcattcagcatttcttcttctttactgtcatgttattcaccttttgacttccactcctgtcttttcttaatatgttttcttctccatctaccaaatactgaacacttgcccagcaatgtcctttaactgacagcaatcccacctctgctaccaacaggctgagtagccaggggtgattcaccatatggcactatctaatcaaaccattggagtagtgagaaaaatttgatctgtctggccctttaggagcaccctcttaagatgaaaaatatatacataattcttctagcatgtacataaagattctaagattattttcagattctagagagttggtagctgtaaatatttttgtttctatattttgctcatatttttatgtattgttttggcttgcataacatcaagagtattaaaatattcccaagggtttttcatttcactgtacggacaaagactagaatctgccattaagttgtttagttcttaaactgaataaagacatgagttcatatactattcacatgaagagtgattgactagcagtgagtgaagttaatcctcatcatctcaaagctgattgtaatctttactgcagtgaattttatcgtgtgtatgcgtgtgtgtgtgtgtgtgtgtgtagacattcaaagggtgtttctgaataatataactagtatcttataatcatagaattttatatgctgaacatttttagagattatttgtgtcacttcctaagtgagaaaaggcaggtctggaaaagtgaagtgacttgcccagtgtcactacaaccaatcagtagcagtgctgagactaaaactgaagtcatccttacctttgctacacttgcttttcttctcaaaactgtttttagcatttattcaagtagcatatgttacgttatcataatttaaaagatttggttttcccatttattatttaaatactaattagtaaaacttttatcaccctatagcagatgtcttctttagagaagagaattttggccaggtgcggtggcttacgcctgtaatcccagcattttgggaggccaaggtgggaggatcacctgaggtcaggagttccagaccagcctggccaacatggtgaaaccctgtgtctactaaaaatacaaaaattagccaggggtgggggttcatgcctataatcccagctactcgggaggctgaggaaggagaatcgcttcaacctgggaggcggaggttgcagtgagccgagatcgtgccactgcattccagccagggtgacagagtcagactctgcctcaaaaaaaaaataattttacctttataatattgatatgtataagacacccctccggaggctggacatctgtctcccaacaatataatatatgagaaaatgttttaatgatcaacgttatcccaactgaaatgcgttacatacttagaaagaaattagttccttagtgcttaaagtattcaagcagtgacactgttgagggagatttatgttcctagcarattattaactatatttacttctgaagtctcttacaactctggttctctcagtttattgtctcagggtgttagctttccagtgggtaracttgactttcaatcctacttgtccctcttcatggccttgagcaagttagaccatcatgttaaatctgtttcctcatttaaatgtgataataataataatatacatgtcttgaggctgttaggagattaaatgaggttttggaaaactccaagtcctaggcctgagacataaaaaatatgaaaccagcaccaattttgtccctcattctattttaactccctgcctcactttgttctttttctcctytgatcttgacagtggtttggtaacaatgcctggagaatacattttggggttttaggggaaccttatgaaaaactttgaaggaagtgaagagttgatgatacatcatgctaaagtaggaattatgctagaaactcgagatcaaataccagctctacctcttgcatgctgtgtgactttgaggaaatcacttcacttgagatttagttttacatccaaacaaatggggatgttaacatctaaaactctcaagagattgtgataaggacaaaagtggttactgtacctaaagaaaacagagcttaaaaatatattgaattccttctttgccctttctatcagggttcgtgtatgcatatattcacaagtgctaacatttctagaaataaattgtaggggttctttaccagtgaattaatttgttatgccttaaaatggtctgtaggactttactaatttcttgagcccagtgtcataaaaggagtattttttcccttatacaaattggttagaatacatagattattacctttgagttacatagattattactttttgagtaatgtccaaaaatcactgcatgaggggcttcattatagggaaagcgataaggagttacttttgagagaggaaaagactgcatggtatgtaaaattgtgtttgtcaagtaagtactgtttttggaaagattgggacaacggaaaacaatctatacagtttagatgtggtgcaggggaagaacttggctagaaataccatgaatcctaagattatgttcaccttactctttttattgttccaaactgggatttcctgatctcaaaagatgggaattaacgtctatgagttgttttcagcatttgacaaaaaccatggaaataatatacatcaaataattttatatgagccaaatcaaatgtagaaattctttgagtatactacatctatgtgtatctatgtgtgtatacatacatacatataattcatacatataatattctaaataaaggggaaaattatttgacaataaaatgagcagataaaaatatttttaaatttggacaaacaggttgtttattaataggtttgggaggggtggacaaaaaaacttctagccctatgcctaactgctagagtaaaagagaaaaaaaagtgttttaaaagtaaaaaataattggagcttaagtatatattggagattctgttgcaagtaacttaaaatgaaatcttactagctggattattggccagaatcctacaaaaagggaagaagccagtgctgttctagatatacacacttaagggattttggtatttttgttgtataccttatggtttttctaacagacagatataagtttgtaagagcttgccatttacaaaaatgtatagtagtgggcataatatatgtatttttatttattctttaaagtagaactagaaatatgtgagatcctttgttcatcttgattgttattcactcaagtataatacctttgctgcagaaattgaactctaaatcaatactggagcaatgaggcagccccttcgaagcataaaatatttgataacaatctagagtatgttttgcctgggtataagttttctgactgtacaatggaaataagctgatggacccaataaaacttggtgaaataaaatggaaagcttcctcaggtaaaatattttaaatttttcatcagaaacatgataggacaagacttgatttactgtgattttcagtgataggcacttagtgtttgagttgcatttcatgaggtggttgtctcccarccaaaggagaaattcatgaactctctttgaagccagagttagcacagaatttaatatgcatgtaattatcaaatgtaaaaatcttcataatttattttagtttaaaagttattaatttaaaattaaaccaaatgtacatatatgcatatgcatttggaagaaagatgagagcaacactgaagacaatgatagttgccattaggaagaaacttaattcataggcaagcagaagaccctatatcttccagttcctaactgtgttgcctgtattggtgtacaatgtaatataattttgtttcccccgtttaccttccttttccctccctttgtttctttcatacttgccattcacagttactcttctctttcctctattctttcataccccacctattccttcttctccagcgatctcagggcacatggctccacacttctctctcccaccctgctctgaagccagtgtcctaaagcatcagaggttatagagtagatggcccagacctgtggtttctcactggatggttagtgggagagagtgaatgagaccttaaccacagtcttgaccatgattagcctgatgactttcagtgttgcctcttcctttgctaagtaacaggaagtaattgttttatgaaatatgttggtgtcacagcaataaaagctccatacataaatggaatgatctaaggatagtagaattgaactcttgttagcatttgtttgtaatcccttggtagagcttcctgggtcataattgcttgctcttctgggagcaaaaggaatcagtaaccattgattgttacatgatgctaagtactgcctacaaagcaaatcttaagaatgattagtggcagagttcagggttactactctgatctctttttactataatctttaaagcaagctgaatttcacagtttttcccatcaagcaactcctatgattcttcaaaaggaagagaaaaaataatgtcatgtaatctataaaagcttcagttgacatcaaaaacaaacaaaaatatgtaaaataattacttcagtttttttaaatcttcctacttccacgataacagggagacatctaaattaacccctgaccagtaactttagtcttgcatgaatatgatccttataatcttaattgatctgaactatggaacctgtggtacacagtcaataacctacatagccgctgcctatttagtaaactatacatgtaatcagtgggatcaatacaaggattctcaaaatccttgcaaaattcattcttcaagattgctgagttttctgaatagctgatgatttgtcaccttgaaacttttttatctattttggattgaaatcttttaataacttacaatactagtgactactgtcattttaaatgggatttattgaatataggatcttcacaatgttgaatactgtgatgtctttaggacatagttgggttatgttataactttgttgacccctgttatttcgttaggacatactgagttgtattagggattctagctcttttactaaataacccagacctacgtatgttctgattgtatkttgggttattacataatcaaaattagcattacagagctttaagccaccttagagacactttgaaccaaatctcttattttatcacagagagacaagcccaaagatgttaaccttcttgccagagaccacatagagccagaaaatgttgatattttcatctcttctaggctttcagctaccaggtcactttgcaaccagtgtatgttaattgaaacattttttctgcacttctgatgtatagttctggtctcctgcaggtttaaaaggcaaattttaatcaggttaaacatttgtattaaacatttatataaaggataaaatctctctgagtgagattctctccttgaggaaatgcatacattttggtgacatgttttggtgacatattttgcttatatgtcactcttgctctgttctggatcaacagagttcaaggatgagaggtgaatgacaaatgaagaggaagagtaactacttggttctgatggtccttggatttatagcgcagatttaggggagctgagtttaattcctagatgttttatttgttcacttgttcctcctttcataatatgtagaatggcagtaataaatcttttcttttcttttcttttttttttttttttgagacagagtcttgctctgttgcccaggctggagtacagtggcgtagccttggctcaccgcaacctccacctcctgggttaaaccattctcctgcctcattctcccgagtgctggggctacaggcatgcactatcatgcctggctaagtttttgttgttgtttttattagagacagggtttcaccatgttggccaggctggccttgaactcctgatctcaggtgatctgcccaccttggcctcccagtgtgctgggattatagccgtgacccaccgtggccagccagctataaatctttagaccttgatcatgcacctaattggaaattgttttttgaatgtatgagcactactaaattagtcagtgggcttcatgggatctgttttgaaatttattgtgaaaccttatgatttataaagcacaaattacttttattttcatttcttgaggacaccatagcaccaatatttacaaagcacgtatctcataaactctcttgtgatattgaagacacgcctgcagcagaaccccaaacttcctgtcttccctaactccagctgtctccccagtcttcatcccgatggaccatgttttagccaactagaactcgaccctgaatattattttttctcttccatgtttttgctcattctattttttctactataaatgtgctcttcaaacagtctctcctctcccaaattctacttaggcctcaagactcacctctccaaattagatgatgggacccctcttcttgaagacctcctccaaccccccataacctattgsttgtgctttatcacatttagatttgtgtgttcttatttggatgcttgcttattgctcatagtagactgaccatttcctaaggcccagagttatagctaactcatttttatgacctgtatagtaccaaacagtgtacaggttgagcatcccaaatatgaaaatttgaaatctgaaatgctccaaaaatccaaaactttttgagcatcaccatgatgttcaatggaaatgctcgttggaacattttagattttggattttcagtttggagatgctcagtggtaactataatgcaaacattccaaaatccaaaacamttctggccctaagccttttggataagggatactcaacctatattttatatgaagtaggtatctcattcgtatatttatggaataaaagttacactgagggtaacttgcttatgggagtggaagaggaagaaaataatctgaaaccgggtcttaaatcactgacattttaattttgaagaattcaatatagagtttagtcattacaaactttgttgagacatgcttttggacattttaacatataatttgcaaagtcggacgtgatttaaaaaattcacatcatggagtttaagagacttcaggcagcaaagaattttatttcatgatagtatggtgattaagagcacacactttggaaccagattgtctggctttaagtcccagccctgtctccggctgtgtgacagcatgcacactatgaactatctgtgccccgattttctcatctgtgaaatggtggcaataactatactttcctcaggggctttttgtgaggatcaaatgagttggtgttcataaagtgtttggaatagtctctggctcatagcgctatataagcatgagctgtcrttactaggcagttttaacaattaaagtgcatttccttagatttcaagtttgatagcttgtgattacaataacaggcttcaggaaagggccaggaattccaagggacctattgacacagctatggatgtgctactatttattttggtttggtttgttcatgtggtttttcctctgtgtgatttatgtgttaccatcatacctgcattgttctcaggatttaggagaacagaaaaggataatcatcaatctacctgtcagtcagaaatagagcgacatggatggtttgaataaaaaygctgccctctctggcaaaatgccatctgttgacattgacatggacaatcatatatgtgtatatctgaatttattgctgtaacttcttattctgtcataaaatggtggacaaattcacaaggagaaaagtaacttatcttagttgttgaagaactgttgcaaaggctttgaattctgcaatgctatcattttaccaagacagaaatctactcattatccagatgcactcaataaattaatgcgatgatgggtcctgtcattgataagataacagtgatttggaagtatctcagtgttattaaacaagatcacagaagagccattaacattttaaaaacagagagatcttgtagataacctaatcaaaatattttactttactcatggggaaactaagatccagaattgtgaaatgactgggtcttaaatacatgcagctagtaagaaacacgggctggtctaaaaaacaggaatgccacttcatttagggctttttttttttttcaatatcccatgctgcttcttataaattagataattctttaatggtggaagactttattttttctgttgttctatattctttattgagtgcctgctcaatagagaagagtttacctctaaaaggagaacaaacaaaagaataataaacmagaaatcatatactatcttagcaggcrtatggggaaaataagtgtgaggagatcagagtactggtggaggagcatagttattttaaatagattaaaaggtacaaacatacagtctgatagaagaaataacacctagtgtttgatagattagtagggtgaccatcgtttctaagagtctattgcatgtttcaaaacagttataagagaataatttgaatgtcctagcataaagaaaaaacaaatatttaagatgatgcatatcccagttatactgatttgatctttataaattatatggatgtattaaattatcacatgtacccccaaaagtgtgtacatctcttatgtatcaataagaaataaaatttcaaaaatacccttaagaaatacataaacagaatggtcaggaaaggcttctttgaaaaagtaacagctgatgaaaggcttgaatgaattaatggagttaaccatatggccatatggaagaatgttccagactctgggaaaaggccttactgcccaggcagaaggccagtgtagtcaacttaagccaatggcttaagtgtagcatgggaggcaggaggtattaaatgagatcagagaggtgatgaaggcytgatcagggaagcatgccattcattgtaagaatgatggcttttccaccgaaagagatgaggaattattgcagagttttgagtgaccatgggacttgatgccttaggttttaatgggatcactgcctgctgtgttgagaatagcttgtggagaaggatcccaagatcccggtggaaatagtcggaccactgaggagattgttgctgtaatccagatgtgtttgtaggagttgtaggagggaatgtaaagacattattggattattagattctgaatatattttgaagatagatttagaatgatgtaatgatgaattggatatgggatttgagtgagaggagtcaaggctgatttcagtctaagtagttgaaaggatacggttatcaccaactgagatggagatgatctaaagatcattttgctcagtctcccaatgcataggtgccaaataaatcaaggttcttatcaaaattagaactgtggacattaccttctcataaaaataaagcgagatatgcctgagagcctcctgtaaatcaatacrgctttatgtgtgactagagatccttataaatacaaaagaaaagttgcagtgaaattgaggatgtctgcctagactactcggtaacactatccagaacccacaacacgtgatgatggaatgaagtcccagggggatgtagaataggcttccaacaaaccactttattcctattttatggtttctttttaattcatcttgttcagcattcaaacctggttcaagttgttcagtttatctaaagcatattgccccatccctctcagctcactttcagtcatcttttaaactttatttcagaagtctactcatcttagaaatgtgcactttatccctaaggtgagctaagtactttcctctctttcctctaggctttgacagtatccagtattttccacccgtttcccatgtactctgctgacatgcatgtattcctcaaggtcaagcatttcttttatccatgwacagatgcttcacatagcaccatgtatactataagctctaagactttgaagtacttgcatgtcccaggtagaggtttttctcctttctctattaagctgtcaattttctatatttatgatgaaaatacacagcaaaagtagtgtaaatgcttattttacttctcaaattactcgtcaagttgccaaggtgccaactattttttgttccacatattatatcttctctacttcactttctggaaagtaaaaagcagcaaaaaggaggttatcaagagaggagaagcaggaaaagttctagacagtctacttcatttttctcatattctagtactctagacagggtgaaggctcctgttgcagaagtgatggtcacatattcctgcaaataccaagtactcagttcagcccgtgcctgcagtctcttwacatccctgtcctcctctgcttctcaaattttacctactatgcaaagtcttgatcaggttccactcttctttagagacatttcctatactctgtggtcatcattaaactttcctccttagtctctattccagcagctcgaatcatctttaatactcatgtgtgtatttaaacatccatcctaccacataggtgtttgattcagtcatgtgtgttttatattatgaattaggttttaagtctcatctttggttttatttacctcctcatacctagaaaaacagattaagcacttgttctytacaaggccctgggttcagagtagtagaattgagagagacagaaagagctagtttctgtcttccaggagcttggtttcatcaaagacataaaagccttgccattaactggagtataaggtagtatatgagatgtatgaagaaaaaatcctttagtttgaggtgaaaaaaaaaaaccaaaaaggaataaggctaagaaggaagagaatcagaggcatcttcatattgcatggatagttgaggtgggccttgagagtaacatatgattctgatgggtgtggttatttcaggtgggagtaaaggcccaagggaaacagacatgttaagtgcatggtgagtcggccagttgagtcagtatgaaggaatttgctgatagcgaacatttattaagcacgtattgtgtgttcagtgctttgcatgtattgtctaatcctcacacacacaaaaaaaacattgttcctttttggaaataaactgatggtgtagaaatgatgatgatgatgatgatgatgatgaagatggtgatgatagtgacaatctgaatggtgcagaaggaaatgggatgccatgcatgagtctaaggaagactatgaggaaggaataccactgaactaattgaatgcggagaaggaaggaaacgattccatgcacattagtaatttagcggttgttagattaatgaatctctgagtgacaacctcatacatttattcaacatgtatttattgggttctcctaagtctttatgtatttattaatgtgcaaaatcagtagatttatgacaggaagtgacttgtgctccaatttccagaaaacattcattacttcttcctgatgaagctgctcagttaaataatattaattgttcttcccctgatgttatacaaaaattaaaattgatagaatacagaacttaaaagacatttttactttactttttgacattattcattgtttgttgctgatgaatkaaacctcttttcgagtgtgtgttccctttaataggcactggtaatttatgtactaagatttatttctgtatggaaattacaagtgaaatttcatattgaatttatatttagcctgttctagtacatagtctctgcatagtatatccatggcatcctacttaatattacagattcttttatattagtgctgctacatgtgtattctcaagcttttaattgtacaattattacaaaaagaggtaaaaatatttcccctacaaaattgttgctgttaattttttcctgtttattcatggagtattcaaagaagagctgtgtgttcattacattccacaagttagtccattcagtttgttcaaaatatgaattctgatgtccagcagttaatataagattttggcaggctattaataatggcatactcaatttgtagctctttcatccatgtaattttggtgatgtatgcactatgttccagggaaaggaatagttcaagattaaagaggcaatcagtgtattggtgcttattttcagtgtgtcaaagctgctaaatgaaagggtgcaatttctacttgtacaatttccacttgtgctgctcaaaaacaagccattgatattagacgtgtatcaagcatacgtggttgcagatgtaaataattaacattaaaaacattttcttctttagttgtgtatttagaacagtgatacttagttaatatcaacagcttatttttagaatctgaattttaaaagtagtgaaaatacttctagtgattaaaacaatgtatgaaaagaaaaaaattagtaggctattttaatataattagtgagtatgctattttaacataattcaaagatgcattcctattttaattaaagctcattcagtatgcaagaattccagtttccattacttcttgctgctgctgtctgatcttgtgtttcttgagggacacttcttttatgagcaattcttttgcatttgcacccagattccttcacgtccaaagcagtagtttaaaagagaaggctacatttttccattttggcctggaacttagatttttgttctgcttacttcttctttaagtatagtgaatatataaacttgtaggcactcctttgcagacagacttcagaatcacatgttcagatgaatgtgggaatgtaggcagaaatcagaaacctgattgtgcttcaccgcttcagaccctgccctatgaggccctccttgtagaagaagaaatggaactgaaccaataactgaagtgaaaaacccttctggaaactgtatatatgaaaagattccatttagatccattgaattttgcctttcattttcaaacttgcaaatagaagcagcattttaatatttttcaagagggggaaaaaaaagagcgtggttccctggccctattgtatcacttccattttgtctggaactgatttcatgcaggagakgcactggaatcagcatgcaaattctatgtggctgttgttcagtctgtttttgattcatcgtggtaaaatatgcataccatgaaatttgctgtcttagccattgttaggcgtacagtttggtagtgtcagatgtgttcacattgttgtgagaaagagctccagactttgtcatcttgcaaacatgaaactctgtacccattgaacaacaactcctggttttccccaccctccagtccctggcaaccaccattctactttgtgtttctgtgaaacatcatataagtggaatcatgcgttatttgtctcatgtgactggcttatttcacttagcacagtgccctcaaagttcacgtgtattgcaacatgcatcagaatgtccttcatttttaagactgaataatattccattatatatacagtcatacgtcacttaatgacaaggatatgttctaagaaatacgtcattggaccatttcatcgctgtacgaacatcatagagtgacttaacacaagccttgatggtatagccaactacacacctaggctaatcgatagaatcttttgctcctaggctacaaactgtgcaagtatgttactgtactaagtagtataggcaattgtaacacaatcgtaagtatttatatatgtaaacatatctaaacagagaaaargtacagtaaaaatacagtattataatcttatgggaccactgtcrtagatgcagtttcctgttgaccaaaatgtccttatatggcacgtgatggtatatgccatattttgtttawctcttcttgcatcagtgaacacttgggttacttccacctcttaaccggttaataatactgatatgaacatgggtataacattctaattawgttttgttcatctgtggtgggtgtgaaagttaaaccaatggaacctttttttagtgaatttagtcaaatttctgaaaamcaagaattcctatggaaacatactgataaacatacttttcttattatatattaaaaatgcttgtagggaaaacccagcttctaatagtactctgggtttgtgaagatgcagtaagtgcttgctaragagatgtttttaatctagagagctagagcagagacttagagttcacttgtttcttctctttttttcaatcatttataagatctctcatcttaactcattaaaactggctgattgactttgattactgacacacccaaactatttcaaaccagttagttcaaaaatgcagttgcctctttgaattatttataaaaaggatctcattacatttttccatarataacgatgatggcaaaggggaagaagggatcattatgccactcctttaaaatgcgggcttctggcctggcacggtgactcacacctgtaatctcagcactttgggaggccgaggcaagcggatcacctgagggcaggagttggagaccagcctggccaaaatggtggaaccscatctctgctaaagayacaaaaattagccaggtgtaatggtgggtgcctgtagtcccagctacttgagaggctgaggcaggagaatcacttgaacctgggaggtrgaggttgtagtgagccgagatctcatgactgcactccagccagggcgacagagtgagactccatctcaaaaaaaaaaaaaagtgacatgctggttaaaggtccctgtccatatcccccttttgcaactatttaatccccagcaaagtcctagccaggatttcctggtaagagtttttctgctctgcgttgtcaacagactattttctccaactgagctcatggaagtaacctagtttctatcactagtgggtctcagtcagaaaaatatgagtgtaggttattgaagtgtcagggttgtggtggccctcttggctgtgtgcttactggggatgaagtacatggtggaatgaaggctcttactagggagacttctgagttactagtttcaccacacagctgtctcacccagtatcttggaactgtttcttgcttcatgtgtgtgaaaaatatagtaaatttcctggtcatattttagcataattaattataccaactattaatttaatattttgtttgatttttagtttccagggtaaaacattaattttctctttaatttccattctataagawtcctattgttttcagcaaataggagtttccttctctgtaagcattgctgactcaagactatataatgttagaaatagaaaaaagatragaacatgttagtatcaatagcctttattattataatcggtatgggcctaacttctgctagcaacattaaaaatcttttcttttactctatcatttagtaacggattttcttttggttgtgtcgaatagaattgtttccttgatgttccttgatagagagtgttctctttaatataggaatacagtaaagaaagcatccacagtttgtgaggcagagtttagtgctgatgtgtacagaaactcaagtgatatttagacaactgagtccttactgggaatcacttaagccttaaaacatctctgccattatgctgcttattttacattgttctggatagatgctcattatccasttctcattcatgatgagcatgggattgataagggagctgacatgaaaattatggagaaaaaatgcaaatagcaaaagatagaataaagcatgtatacctcatgatcattttccccattgatattgatttggactcactcttgatgtatcaggtgtgttcaatctttggcaaacatttagggttttcgtttttgctgaggtccacttgaaccctggagcccaaaagaagtaaccaaaaatttctatagcttagtaaattccatgttctagaacttttmatgtggacctcagaaaaaggaaataaccaagagtgccgaaagctacatgtactttgaattgttcagcatgtataaaacccaatggctaaccgtgtctagaaagaaggagataagtaaagtaagattggagcctggcgtttggagttcagcaacttttctctgttgtgcgctgacatttaagttaatagagtgatttctggtggatttctttgaaacaagacagttcatctgagatttggttaaaaaatatttcattactttgaggaagtgattagggttggtcttatttagttggggctttcaaaattgatagttttgcctgatgrtatatgctaaaacattgaattgtgagtttcctagccagactggaccctaagcccatcatttggaaatagtctttcttatttttgttattcttgtatttattaaagaacattggactagtgaaaattacaaaagaaaggaaaatgacacaatacactacattctgttgtatcccatttctatctcakggaattatgtgtgtttaccaaactgatgtctagatgaacattcaatttcgtatcttgccatttaaaatttaacatcatgtgcatttttatgtcattaaatgtccaaacacctggaatttttacgtttgatttgttattgctaaaaagtacttctcttgatttttaggggttttcacttttaattaaaacatattcttgaaactccttctcttctccttggctaaacctgttatgctacaggacttcaggataacttgagctgctttggctctttgattaagtgcagatgtatttagggtttgaggtgaaagggtttttaggacaaatcgcattccagtttgagggaaaaagagagagaggaagttttggaagttacaaattcattaaatttttgcttccacatggaatccacaacttttccttttccctggctgcctttctcttcttcattgagttttccaggcctctcttccttctgcacaggctccaaagagaatggctgactataagggttattagtgatattttgggagttattccgttcttatccactctcccaccaacacacacactctcacacctcctcccatcaaagcttgggatctctgggaacagggaaacatatcaagatattagaagaygtcaatgttatatatgcagaaatggtgaaaaatcaatgaatttagtaagttaaatttgtttgggtagcattttaaaaatatttaagtactttgacatatgttaccccctaatacacagagggtgctcagacagcatttgctacaggagtgaaccctggccaaagctgttttaaccaagggacagtggargcccagagaggttcgttggtttgcttaaaatcacacatccatgggtaagcaaggtgatggataatcagctcaattgagtcagtttacattgtatacacataacaaagcatcatgttgtgccctgtaaatgtatagaattatgatttgtcagttaaaaataatattaataaagtaaataaaatcacacatctcacattgagaggagggcagcctagacccagatttctgttagccccargaattgaggcatatatgggagactagcagacaacacacataggaaacttttgccacttaattattattctttttctcaagaccactatattcatttgggtttgttcttatgcttttttttttttttagcaaattaaaaaaaaattatccttgaatgattctaggttagctttttgactaatggatgttggaaggagctcagtgacaaaggccagggattattttgcttttcctcacctcttcctttgttcctcctcatcatattacaaccttctgcttcaggattccttctgctttttagcaggattgacatgctgggccttacccggaaaggcaaaggctgatttgattagggaggtctttgttccaggtatctcrcatcagagagccttcataacaaatgagaggartggattagaagtttcctggggataattttttgtctaccctttaagggaaatcttgccttcattaattacatctcaaatggaatatgtggaatatagacattttcataatcaacaaggtgattttcattttaaaatgcttaaaaaatgttaagcagcatgtatgcacgcacacacatgcaaccaatttcttscacctttttcttgttttaattcttaaaatatgaatttttaaatataaggaaaatcctaaaagcagaaactaataaatactaataaaatgttaattacattgattaaatcattagtattttaagatgggcccctgaaatgtctccataaataagcttaatgtgctttcatttaaacaacaattcagttagtaaattcaataaaaagcaaactaatgtgacataaacatatttatgtgattagaaaatcattatatccactttaagtgaaaagaaaaagtcttcatttttgtgttacttttccaaacctccttttggcactgaattgtactttatgggggtgtcttgtcatttttttctaaattaactacacctctgcttgcctggaaactagagccattctgacttctattccgatatgtgtktttcatctcctactttttttttttttgagacagtcttgctctgtcgcccaggctggagtgcagtggcacaatctcggctcactgcaacctccacctcccgggttccagcgattctcctgcctcagcctcccaagtagctgggactacaggcacgtgccaccacgccccactaatttttgtattttttaatagagatggggtttcaccatattggccaggctggtctcgaactcctgaccttgtgatccaccctccttggcctcccaaagtgctgggattacaggtgtgagccaccatgcctggccttcatcttctactttttttatttttaaatattttttattcactattgctgacatcactctcctacctactcggtattctttcattatgagaatctcccacatgaaaamtagtggcacctctggaactcccaaattctagtttagacagattaatccacatttatgttactatttataacagcacaactctgtaaataaatccaaatgtccatgatttattggttacatgttatgatattctgtagaatggatattattgtagccaaaaaattaatttacataggtacacagatgatgacatggtaagctttctttaattagaaaatgtttctttcatttaatatctttcatcttaagatcaaaaacaatcttgcaatattgaccttacagcactgttcttctgttatcctcattaaaataatatcaataacaataatagtaataatggccattgttgttgttatgttctctgaggcatttagctcagagaatgttgagaaaaaaacctgacaaagtacttaaatattcttgatgccatctctctcactcttcataggttgtggatataaagaactctgtttttttcattttttataagccacaaacaatgaagtaatcatttctttgttaaaacaagaatgtgcagattattctcactgaaaagttaaaattgagttgtatttaagaataagcatctagtcttgaccatagtgtttatgcctataattaaaacaaaccaaagccaaaaacatatctttcaaatggtttggtgtcacaccacaaagcgagttattttaaagccattggaggattctagcaactgagcaaataccgctgatctagtcaatatcaattgataatgtattatatgaaggaaagtaaaatctctttcaaaactttatacatgtttcaattcagttaattatgtaataatagaaatggcactatcrtataagagggtagatgatataatttatagatcattttatcacttaaagcacctctaagtgtagaaatagaatcatagaacctcatattcaaaagcctttctgtttatctatagtggaatcgattaaatcatatttgtgtaataaatgacagtcataacaaatacagtaattaaaatacagttgttttacaaatcactgtcttccactctttccacttccagcattttcttttgatgggttagaagattaaatagcaagttgtaattttaagttatggctctttgacagtggaaaatggattaaaaaaacacacaacaacctactaagtcttgtagtttcttccatgtggtcttttcttatctagagatagtaagtcaggcatctacaggaaaagaatccactctagtgaattcgtgcctgcctttgaactgtgaaaatcctttgcattgccccacatttctaaagacccatgaattgtgcrgtcagctagaaatatcctgtttcaaaattgagattacgtgacactgccctagaatgacacttgagctgaatgctcttgtccactgctgtagggtacacatgaaaccttttacttagaaatttaaggttcttcatgtggctggaaaaatgccacaacatgacttttatcaggctaaaatttactgtgtcatgaygaaaattgaataaagtaatcttgactcattttaatttatttcacctatgtctgactccagctttatcctaatatacaggacaaaagttatttccataggagcatctattatttgcctctatttctaaccctgtacaggtatgttagaaacactgaacataattttatatatgtctttgtctcatcaatacagtgcagttttattttttaactgaagaattcgtgttttgacatataaggggttaccagagctatccaattttattttatgaaacaaaattgtaattattcaaagtccaagacatgaacagaaaataaaaagtaatgtttaattcatgtaagaaagcataactgaagctcattagtcaaactaaaaagctcatgaaatttctcacctgaatctttcctcaccctgggcagagacttcctttcaatttgtgctcaattttaggcaacatttaaggatctgaataggcaaagagtgagagcaatgattgtaaatgtgttgttttaaaaggtttctccactaaattsgtatatgacaactgaaaaaaaccttgggacaatgtcattcagaccacaggaaagtgcttgaatatgttctctgatgctctttttagagcagctgatataaaaagcaaagaattttatgtccaaaagacttaggcaaaatatccgaacggaatgctgaatgcatggcttttcaatttatcacagtttatagacactttacatctatagtagtaatttaatttaatttcttagaattatggaaagaacaaatggtatcatttagtataaatggttctctgctcccctcacctccggagttttaaagatggtaaaactaggactcagagatgtgaagtggctcacccttgatcacacaaggagacagtgatatattttggttgagcccaagtctccttctgaatctagagctatagctgttaaactaaggtacttctcaatcatatccatggagcaaggatgtgagagtagttggcttttgtattatatgggataccactgcaaaaaagtaagcatgacagtttcaccttaggggtgaatttcatgctttgcaccagttcaatacaatgatgagagaatggctctcatggtactgaattggacactgtacaaattcatggtgttattcatattactggccataaaaagagcaagatcacatttatatatgttctggtgaaaattactctccagtgtttctgctgtcacctacccaaaccaagctgtatatttttttcttgagaattttgcatccatactgtttcttgtttggtttgcactgacraagaacattcttcctccacagcacagatctagttatttgcaaaagatatttttaaaattataagcaaatgttgatttagactccttacacattaattaagagaagcacttttgtggatgttctttggcttagttcaagactttgtcaatctgacttttcattaagactttatttattattttccccaaaaagtacttgttgctcagatttgaataagagtagtttacttgtctacagataaaaacaccttggctgtattcaaagagtaaaatatttaattcaaattttaggctatctgaattttatcctttctgcttagaaatgataaacaaatatttattcttttattgagcaacagctatattccagaaytgttttaaatgcttgagattggggaatagagataagtgatactagcttggtatgcacgtatatgggtgaccagggggattgttaggaagaggaagaaagagaactattacaaacacgcatttataaggcagcttttaatcatcaataaaatatggtaaaatatgttagtttattaattatttgattaaacacatacttttttgtatgtgaaatactcaagttaatttgtcttgtttatttggccttgcttgaatttactaagtaaacagaaatttctagccattctcaattcaaatgaccacaaattgagagaatcaggaacacttagatacttagccaacacttttcactaacttatttaggatatatgcctgagatcatgacaataataataatcatggtaaaagtagcaattattgttattttaatagtcataacagatgagtgttgccatggaggtcagtatcacaacacarccaagtccatctgcctcattttgatgttttagtggccacctaactgataccgtctggtgacactcaggtcagtgactcccgctttttctaagggatggcctcagtggtttggggaaggtgccaaggaaagctaactggggacttgctcctgataagtcagtgatcatggaccacaacaggtggccatgaccccaggggggctttgcacacttggaaaggtggagttgtgcaacattttgctgtctggctgccaccttcagtggcagatctattgccacttgggttgtctttctcataattatgttccgtatttctcaatatgacagaagtttgttaacctagttttagttctaactctgccatttactgctcatgtgacccttggcaatctgtttaaattttagcattttcatgtttttcccacctataaaattaatatacttttctcaggttagctgtgaaggttaaatgagatgatatatgtgaataggattttgtaaactttaacaacggctgacacttactcaatattggctatggttttatcagataggcatggattgagttatgcagcttctctgttctcaccttgtccttggtgcctggggaatgtctagtattcgtagtcagtgcagtcatcccagttcctgcaacgtggtactgataggaggaacaacaatcaacatttaagttttgtctaacttgcctaagtttcttccatttacagtaagtgatgagaaatggggtataagtgtgagatttatgtcactattcaagtggggatggttaagtcaattaatattaagtaatattatttaaattaattattgtctccttgactctaatgtaggaatacattatataaaaagtaaagattttgtcatctcatcatccacagtgttttgcatgtgctaggttcttagaaaatacttttttaatgattggcttttgtgtttacctcaagagtatagagagagactgaaaaatatgtaaaattatgataatcctgaagtttaaggttcatgaatcaaattttcctcttcaaacaggtgaataattttgaaatttattagtaaatatttaagttgactctttcccaaatactgcctaacttcttttcttctataattaagtcagataattttaggaaattggacaatttagtcatctttctatagcatgtacactacagatgactattaaattatgattccttcagaatctttattttacaagaatataattaagcttggctcagtggctcatgcctgtaatcccagcactttgggaagctgagcggggtggatcacttgagctcaggagtttgagaccagcctgagcaacatggggagatcctgtctctacaaaatatacaaaaaattagccaggcatggtggcacattcctgtagtcccagctacttgggaggctgagataggagaatcacttgaacctgggagacgaggttgcactgagctgagatcrtgccactgcactccagcctgggtgacagagccagaccctgtctcaaaaaaaaagaaaaaaattattcaatcatttatattttctggaattttttctaaaatttctcccagatactttaaaaatactcctgcaaacaatttccacttgcctagcaggccattcagaccacagaactaaaagcaaaatttatcagcctttccttccaatttgccatacccccacaaatcgcacttataaagtcaagagtaagcacatttctaacaaggaccaaaacttttttctcaccaatgrcactttcctatatcaagtgtacctaatcaggcctatcattaagaaacacaacctttgctgtcctctgctatatcacatcatcttttcaattcagattctatttacaaaaatcctctaaactcattggtttttctacaatggtttttgatcacattatrttactgacaaatgctatttttatctcctatatgggtgaatcatgcatattaactctttcctgggatgatggacataaaaaatctcctttagagatttaattacatttaaattattttcaagtcaagtagagtataaattcacattttacaacagcccatcatagaagtctcactggatttgttttctttccgctaatgtcccaggtcacctatctgaaataagctacttaaaaaggacagggtggggagatggcagagaactgtgctgcaggtttgggaagcaaagaaacaaataataatgtaaatgtcatctgtgatctaagattgctatcagtatcagatattttggcttttggtcctctagcctacctaacatagacttttttttttctattcaaaaaaatattacacttgtaggaaatgactagtgttgactttctcactctgagtccaattacgggttctttaaactgctcatcgctagtattatatgatggtcagctttaatgagtgctcagaagcactctcattatatacaaggcttttgaaataagctcctgtctcgatcaattgcttcaccttcttcagagcaattagcataagaataaaggaggttaaattggacttccgggctttggtgaaattaattaataccacttcaccggtaaggacaataagtagataaccattttcattactttatgtgaaagacagattatcacatgcacagcacccagactagtacaaaagtaacccatgctgaatgtgctatcttttaagtccatgtattatgaaagatttttttcctgtaattttaatagctcaaaaaaagttttaatttattggtgacttgagctgggtaaaggttggccattacatactggcaactgcttgggtaggatgtaagttgaaaaatataagaaaaagaatggcattaaaaaaaaagtagcctgactgggtgctgtgcacttgtagttccagctactcactaggaggctgaggtgggaggatcgcttgagtccaggagttcgagtccagcctggaaaatatagcaagacatcaccccaaaataaaataaaaggaaaaaggaaatatctgtactcagatataataagctatctattctagacaaatgactgattagtattttcatgctcattcttgtacataaaaggtaaagtgtcctataaccatcatattttttggaattccagagcataatgccagcgatttaactgtatggatagtagttaaatccttaacaatatatagtacatgttcattttctaaatagtagttttaatgttataaatgaaatgcagcttttgcaaattgaaaatcatgataatagaagtctgtaccctccctttatggcccattaactatctttgcatcataatatagttatctttctcaaaaaaattaagcatttagctctctcaaagatgctgtcacttttttaccctaatacgtaacaaagttgaatggactcctttcctccactgttgtataaatttaatctacattacaagataccacactactattcaagatctatttgagtgtttaggcatttcttaccaaaataatctgatacctactttttaaagaagtcaactggtcatgtcagtgaaaatggcttaattttggcatatagttagtaaaggctaaattgcaagtccaatctatttttctgatcttatgtgttcacctgaaagcaaaataatgagttcagatattcttgcatggaaacatactcattgtgatcagaatgaaggaagttattgctaatgcacttacaaatatgtttatccctgcgagctaatgtgtctcaattcctgaaagtcattattaccttgctcctttctagtattttaaaagatgaaaaagtgataaatttcaaaataataaaacatcattatttttgacattgaggatgtcattttgtaaattaacctatgacatttttactttttggttaatccttcagatttactcttcattgcttttaactatgaattaaagtaatgagttgaattaggtaaatgtctaacataattaccatgtcctcagtaaaagatgattgttaatgtgtctgatgatggctggttgactagaaattatcttcagttccacattttcaaaatgaatgcaccgtgggtggaatggaaaataataatttaaggcacattaaccattaatatagatctagggtgaccaattgcccctgtttgcccaggacagggaactttgggttttaaaactgataccaaggggtacctgggatgctgaatgttcagtgctaaaaccaggaaagtccaggcaagtgctgagtggatcaggctacatagattactgcacaattaattatagtaaattgattctgtatgcaacttaaataaacccagtttattgaggcatgatccagtttgcccgtgtgagaacctgatttctgtgaacrtggagatttagccataggtggctgaaggagagacataatatagatgatgatgttaatgatagcaatggtaaccatttattgatgacaggactggacttttttaagacttagccaaagataacattctctgaaatctttcttgatatccttaccctacccagaattttctgattcttcctttttactcccaatgtaacctgtgccgaagtttattataatgcccttaaacttccttattwgtttatttgtcttcctctgctagaatataagcttctttaggaggatagaggcattatgttatttatctttgtaccccaagcatccagtatatttagtgaatgaatgaatgacctaggtatttttttttactcttcaaagtaatacaataaaatacatgataccatcctgttttactgatgagaaacaagtatctaagatgttctgtaacaagcataagaatacgttaataaattatgaagccaaagatggaaaatcagatctgtctgattgcaaagccagttctctttccattactctgtattaaataatgctggccaaacatagtgacttggaggaccctctcctttcagtaagagagtaggaatcagatatacaaatgaagactatgtcagtcttattatggatactgatgaaagttttctggtaatctgcaaaatagattttatagataattgctgtggaaaagaagtgactaaatgtaaaatataatctctgctggtatgtttagaccaggmaatcaaaatgcatgacctagtcagacaaagcaaaaggttctttacgtgttcttcttgtatcatcagtgagcctttttcatttaagtacaatgaagtgtctctgccttaagaaattcttcagaggcagaaattcattattctttattaactcactgtgcccttctccttcttctgcaccttttcctgtgtattgtctcccattttaaaatgtattaactgagaactaaagatagcaaagtgttgtcaatattataaagtatagtaagacagcatagaactacatggagaatatattgatamcagcatcttttacacagtgatgaattaataattaaaccaaacaaaaccaaacaacaaaacagttttacagctacttgggaaatatctgtaaacaaagtttcmtaataattaactcttggaatatcgtcacttgtacaaatgctgcaattctagcaagtttgggacacttacaggaaactgtctgcaaataaacatgtataatgattttagtgtatatgacatgaaacagacggcgacccatttattaaggtccattacacagatataggagggactttaaaggcatcacaaaatacttgccaggaagtaaatgttgactatttccaaatctcagtgcaaaatgagatagataacgttaacatgcacatggagtaatacattctttaagtacctattcagtgaggacctgctatgtgcaaggcacgtattccagatatatattaatgaaaattgtgatcagttaaaaataaatgttactattttcattgatctcattttctattttcaataaatcaattacaggtaaaatgtgttatgagtgacaaaatgactggaaagtttttgccttaatcaaaatttgtgtaattattttttgtaggtaatcaggtgatttagaagcttaggaaattatgatgctatttttatagttattatgctattattatgatgaatcacccattcatgtgcattaagcagcattgattaatatttagattttcagcgttttaagtgtctgtaccttatttacatattattaaaaagtcaccttggttgtaatcatctgtcttcccatgatcacaatacaggtttgtggttttcaatatgtcatgactaagaagagattttatggtgcttaaatatgtagtaaattcattaaaccttagtcatgagtaaaatgatccctgtaataccactagttgcataatacctgcttctgatgcctgcttttaatttttctaaatacattggctggtttctagaagataaatgtaatattctacagagctatagactgttttgccacttggaatatctcgaacagttgtcatgggcaaggccgcaggtgctatatcccaagtgtatactgcttttatttttacatgtacaaaatattagaataataaatatatggtaaggcttctagaaatgaaaactgttgtcaatctgtaatttatagaaaatttatgtaagaaaacttatgttgtcttttaagcaattctcctgcataataacttagtttagagtaagaaatatgcatcttatctaaactgatttatagaccacatgctatttttacaaatatttaagaaaattcctagataaactttggaaccaaaaacaatgtagcctaataacaatgtcaactatacttacagtataattttatatataaccttttatctttataataataaatactatcacagccatttagagaaggcaattttagtttacctctattgcttaaaggctttagctattatttatgcacaacaagaattctgactttttaaaattagttttaaaattttggatcagctttataaagaaacacattgttgttaagtgcagacaaatgagaaccttgccatttctgcatttatgaccagaagccaacagagtcaattttcatgtttatttattctttgctttagaatgttatgtcagttgacagtattcagggcttgtgttgatgtaaattgccataaagcaaggaaacacgggctatagtactgtcagggaggctcagcactgcagaacaacacaatttaagaaaagcatttgcagaaagattcagtgtcagtcttcggaarttgactgtagatgcaaattggcatcaactacttcacaatctccctctaacaaaagagatggaaagggtggaatcaccaaacagagtgcacttttcggcatagtagctttcatgaagacaaaaataggatcccatttgttcattcacaatggatattcagactccacattctgccacccccatgttttattggagcctgcaattctgccaggagaagggttgcctcatgctaattcatcctaatgtttctcctccttcctacataggggaagtcttccaacccttcctactttttaagattagaagaaaagattcctcttaagccaaccatctctttggttacctttctgtaatgcctttatactgatgaaatgctgttatgttttacctaagttcggatattgtcattgtctcctgctgactcaacatgcattgtagccaggatcctggtctaaattcctgttatacaaaaccctgagctcttctaatttgcttcttgaaaaaaaaaaaaaaaaagaaaatctggccaggcacagtgggtcatgcctgtgatgccagcactctgggaggctgagatgggtggatcacttgaggccaggagttcaaaaccagcctggccaacatggtgaaaccccaccgctactataaatacaaaaaaactagccaggtatattggtgcacgtctgtgatcccagctactccgggaggcggaggttgcagtgagcagagatcatgacactgcactccagcctgaacaatacagcgagactttatctcaaagaaaaaaatagtcagctctagaattcttagggcatagaggcaatgttaacaaatcagaaggtacattaccattttaaaaaattttgtcaggcttatactcagatctctttaaacattacctacatttaaagaattattgtatgtaagagataaacacacaggaaaaaatatttgatttttgcttttgacctgtgtcattaaaataagatgattctccttatttctcaagaggcattccaattttaaatagagtggtagggaaaaaagtgattttagcagggatttacctgttcgtttgtactggtaagttatttttgtgttgataaattatttacactttaatggaattgaggtgtcatcatcttccatttatattattttgccttcctttttcacaaattttttactattaagaaagctacaagaggtgttatttgaggaaacagtcctataatatcattctttttttaaaattgacagtttcctcaaatatttatgggggaacctttctacttctcaaatttgaacagacaactttagtcaatgcttagcattgattttttgacaactcatgtccatttcaacattttattgtgagatagctaggaaattagttgtaagagcagaaaggtaattaggtaggtggtataaaatttttgacagttttgacactactgatattttcaggaaaaaaaacgcatacatatcctagtttagagtaagtctagctgaaaatttaaatatatttttaactgaacataatttttgagtttgagataattttagatatacatatagttgtaggaaataatacagagagaacccctgtaccctttgtccattttccccaatggtaacattctgcaaaaccatggaacagtatcacaagcaagatattgaccttgattcagtcaacatacggaatattttcatcagcgcaggaatgtgactattaaaaaaaatttaaatttttgaggattattctacctccaaattctttagtactaaatattcttacatctagacaaactaaaataggatttataggaaaaatgatttgactagagagtcaatatgcctgaattcatatctcagctctgccaccatcactggtttaattacatttggggagtcacagcgtggtggggcctcaatttattcttttggagggacttagtctaaatcagtgattgtcaactagaatgaaagtgagggaactcctcccttggagacttgtcagaatyttggaggagacgttttgcagacaaagcccaactmttttccytccacactcctacctccaccaccatcacaagcaaattctgatgtttgttcctagacttctaagattttgactccctcatcttccattgaggattgcttatggaaacaacgtaatagattcctagcaaatcttcatgtatagtgtgtcagcaactagtctcaagtgtctaacgttcttttcaactttaaaataataataagaaaaaatatctaccaagaacactaaaaatctttgtgcttcacaccatctagctgatgacgcataagagtagaggaaaatgtggtcaatacatgagccaaattcagagtggtgcatgcagaaggcttcctccaacagggatttgagagaaaggagatctgaggaaatccagttccactagggaatgatcccacagaaatggaatcttccagcttgagaacctgaagaaagtgactcacactacatgagaatttgaccctatctgatgctactttcaaacatatttgagtatttatagtttctaatttttggaatacgtagctttctctataattttgataccctatctccagaaaagatttattataaagttagagcacaaagaaagaaagatacagttgtgtttttatcattacaattgctgccttaagcatttctttctgtggtctagtctaagttattaaacctcattagttttttacttctggttagtgctgtctccttgattgtggcaaatgcaagttaccaatatgactctttgctacttctttccataagaagacaaaatatatggcaaaaagagaaaaaaactctaggattccaaattataagcactactcatattgaaagttagaaaaagaaaatgagcctgaactgaaaatcaaacaaaaagacgagaaaaggaaatggaaataaagtttccctgtatcccattagggttgatacattaaagaaagagtgaggatagctggaaataatattttccttcaaatgacagctaaatgagatctttggagctgtgccacaatgagtgaagtcagggagacagggccggtagtgacaggaggagaaaagtgcttcttcatgtgtcagccctgggtttaaaataactcagaaggtataaaagaaattccctcctcagatacaagattatttgtgggacacctgattaccatttaagagatatcaacagttaaaggaaggtgatttaaatctggatagctcccttttaaatccagccctctgattctataaggcaaatgacaaggctgtctagacatggagtacattgagcaaggtttagatgagggagccccggagactgtgagacagacctgttctgtgcctgagaatgtcagtgatgactcacaggaggtggagaaaagtgtgctcaatgtatgggccasgctcagggagctccttgaagacagatcatttggtattaatgatacagcgataccacaaagcacaggaggtgtagcctgctagcattgaagttaggaactgatttgaattaacccagtgtttgaatctggatgcaagagcctgtatggtatcttgcatgctaacttcttcataatcttgttcctgaatgggtgccagattgaggagtctttgggatagttgatatttcttttaaaaagcctgatctatataaagctgtatcaaccacgtgcaaccactttagcataccactctatattaatagaatagaaaagataattagcagagaaaaagagccaaggaaagctaccaagaattagtgaaatataaaatgtgttcttattatcccttcctcaataaaggggcaaacaaggttgttctggtatcatctgtgggaattttacacaaactattttaggaggaaggtgggtgactagatgatggatggatggatagctgatggatggatggtggctgaagtgggtatgtgcattgaaagaaactgcaacagagcactatcttctgaagtcacttgaagttatcccaaaggtcaggggaagaaaagggaaaaccagaaaccacatatgaaattagcaaagctgagcccgagtctgaacgcactgtgaggaggaagcaccattagggaggtgatccattgccagtggaaagccagaagctcagaaccattagctgagaccgtgctcctcccaggcagggaccctctagttgcctggggagatgatctgaattcacataggaatggtcgttgcctcttccatgaggatcatgagaacatcactaggtccaaaccacaagctgttcttgtaaaagatagagtaaatggttacatcaaatataatcataactgtagtcaacctgcagctcagagatatgtaagagtacaagtaaagctctttatccacgtgctgaacatttttattaaaatgtgtgaatgaaaaactattttaaaaaatagaccaggcatgatggctgatgcctataatcccagcattttcagaggccaaggtgggaagactgcttgagatcaggagttcaaatccacccccatgagctagtcacctcccaccaggtcccacctccaacaatggggattacaattcaacatgagatttgggtatggacaaatatccaaactatatcaggtggttactgtagagaaggggagaaatgaactcccttaacgttccagctagatcttacagaagaaaataggaattagttttgatggtatacagaaaggaaaaccatgtgaaaacaaggcataaggctaccaatatgtttaatgagaataaaaggaagaaagaataagtgactaacatacgtacgaaacatgcagctcttagatccatgttccttcagtgctctttatacttttcatggcttttcccacgtaagccgctcaactcacctaaacttctgtgccccataaccagtttccattaattgacattataaccatctttcaaagcatggagcagatacggccctttttcccagctacgaggatttgtcaaaagcagctttttaaaatggttatcttcgaatgtgcctaatttttcttatcacactgtaaactttttaagtcaaaaatcttatgatcaaatcatcattaccatttattacttttcatcttcacctgtctgcctcccctctgctcaaccccagcccctcatgcagtacgtgcacaataaatatttgttgaattatgaatgaatacctaatattgacatgcaaggagtttcatgcctcagttaaaactcccagaaaatctttttccagtccccagttagagccagtgtaataacagtgactttttttcaacaattacttaaataacattattaaagcaattgttgctttaggttgttcattaataaaaataaatgtatattttctttactgttagaacagtttgattctgtatgaattcctattcctgattttattatactcctgaaaccacagcttgctgctggttcatctattaggcatttgaaatgttgaattactttgaattgcatttgttcttatattgcctaggctctggttggcctcctagggtcgtcacaccataatcttaaacacaacatgtgccttgtggcccagatgttttccaagagggagtgctgcagccaagaaaagcaagatagtatcttgaatacccaaaggggttgatatgactaaaaagcaaccgtacagccaactgtagagctgtccaagaaaaagtgagcctattatttgtatagtttaggtttttgtgatcaaatagtaaaatttgcaaaagtttcatgataagatcttttgcttcacagattctcgtaatatctgcttttgtagtgtggactccagtgttcagcagtttgtagataaaactgggatcgtggcaacaataagagaaatcaaaaaaaaaaaaaggaagagttcatggactcttgtttcttcataaatgtgacatgataaaaattacctttctttcttaatatttgaaaataacataaagaatgaacaaagattgcttctagaactaaacttggattgaggcaacttaataaacggctgtttgttgttgtttctgttcttttcttctgacaatatttaccttttatattcttgtggagagctgagatacctgcaattgtgcttttaaaaaattgttctgtcttcttgcagtgaggtctcttttttggcttacttattaacaaagaagcaaattacatatatacatatactttatgtaacatgtatacacatatgtatatgtaacaatgtaatgctatgtgtatacatatatgtatgtgtaatatacatatacatatttatacatatgaaatataaatatctatatttttatttcatttacctactagctgattcacatcgttttcataaccaaaatatagctcatggcttgagtatgaaaccctgaccaaagtatggaatttcacatacatgtcatgataatgtcctagtcagattcagtcctacctcttgcttctgaaaatgtgctagcttctgttctaatcctaattgcatgaattagttcattgtccagtttagaaragaggaacgagtaggaagctgctttggttctggggtcaatctaggacttcaggtctattttagggaaagcattctagaatgtccttgcccttcctgatacactttgatataccttcaactttgagatcattgacttagtgttatcttgaatgagggggtccaatasagccagctactccatgctgatttagatctcaatgcttttgaaattcaagtttttaaagcacttgactctctgttttctccaaatgaaatcctattttgtatttaaaacagtaagaccagatttccccttttgaagtaattataggatcccaagaacccttaattccactggtcccatggtctacttatccccccgccccccacagcaagtcccttacccctgaggcagcttcagcgactcctccactcacccagcactgtaggaaaatgtctgctgtgctccagccagagcagacctactgtattgcaaatttatcgtggctggaccatcctccagagatgtatgccataaggacaatggaggcctcagctaagtacctcctgctgcattcattcccagggtagtaggtggtatagctgcaagacacggaacccagtattaggccttgctccattttctytaggcttcaaagctctgagccagtgatagtttataaaagcccaggactccaaagaattaaaatcagcacctgtagatctcctggtgaagataaactccatgggcatgtaaagaaagcaataaagatacacacatagtttttttttttcttttgaatatcaacagtaaccttgagcagagtgactctttatcagggctcttggtacttaggctgagctggtgatcacaaaggaaagaattagaaatttaaggtgattttattttattttatatttttagtaggagtatctggctgctatctaaggaatctcttctattagttacatggaaacttggagattttattgtttccctctcagtgtgtgtgtgtgtgtgtgtgtgtgtgtgtgtgtgtgtgtgttagccatttattaatcctaactcccccaagaaaagacaatctataaatttcattttcactcacattaaaaggtgagatgcaggctgggtgctgtggatcacacctgtaaacctagcactttgtgttgacttagtgttatcttgaatgagggtggacagatcatgaggtcaggagttcgagaccagcctggccaaatggtgaaaccctgtctctagtgaaaatacaaaaaattagctggacatggtggcgggcgcctgtgatcccagctacttgggaggcaggagaatctcttgaaccaggaatgggaggttgcagtgagccgagattctgccactgcactccagcctgggcaacagtgccagactccgtctcaaaaaacaaaacaaacaaacaaaaataggtgagatgccaattctcttcctgactctgcactccagtgcagtgctccatttcccctattgataataccaccccaaacatacctatttttccaggaccacatttcttcaaattgcactagtcatgctgttaagaaacacagaatctaaaaatgatctgagaaaaagagaattgcaattacaaccacaaaattttctatatactagtgaatggataaagatatttattgtgacacattgagcaatttttttgaaagttcatgtactcttgctcaactgattgaaactttgggaaaatgtaactttttgagttgtaagatcatgtaaaagttaaatgaaggaagaacagcaaagaagttatgggaattgttgttgtgattaagtagttaaatttgtatatttttttcctgctgattagggagttgttactgaaatacgttagcaggatccttcttttagcttttcacatgaatatttgggttgctttctgccttgataattaaaagagaattgtgtatatcttgttttccctaaagaaaggtgatactgactttatcatgtcatcataatcttcacagctagtagtgaaatacctttattgaacatccaccatatatataagactgttctaatctaaactcaataaacctttaaggtctatttcttattcttcttactttatttccataacttaattagccttcaaagcccaattctaatatgcataatgacttgaagtattttccaaatacaatcagtgatttttttgtgtgtgctaagtgttctcaggacagggtcaaaactacctattacatacattcaccatgagaatttagcacagttggcctctggcaacagactcaaagatttattctgtgtagctattttctagcctgctggattccagccagttgcctaatggatcatgagtgagtcagtttcattcagtctcttagcaaagtcaatttgtccagcagcacacaattttctgtcatgtagggtctttgcctggcattgctgtgacaaacacaatctaactgttttgcttccctagattccaactgagctttggccctggaaggctggcttagataatcaaagtcccctctaaggagggaaagatggtataatgaaggcttcctggaaaaattagaccctacaatttacccatctccaaaagtgggtcatggaacaaaaatatccatgtattaagttagattaatatttgtgtgtgcaatgaacaacagcatttgccttttgattacttcgggcccaaatgagctttctcttttaagtagcagaaaaataacaaaagcagagtacacctggaagggacagaatagtcacaggccagtgttgtaagagtcagtgtggcacttctgaaggaaatctgccgagtgcatgggatactagagcaccatgatgggcaggaggagaaacaccctctttctctaccttccttctctaccgccactccttcgagatggccaagtatggaatttctctgtcaggggtcctgccacctgacatgtgcaggtccagttaggtagttgaaaaggacacattactacacttatcagggttctcactacaaacaaattttcatagtccttctggaaataagccacatcaccgaatgcctttccggtagctgacatgattgattgtggacaacgaagaagtcacttattcctaaggaaragactggagtgagggttgctgtttgcacatacataaaatcctagaagagataccaaagctacattatgcagaaagattattattttagccagtggctctgaggacaacctcatttgtcttctctatgggtcactctttttttttttttttttcttttgagacagagtctcgctctgtcacccaggctggagtgcagtggcacaatctcggcgcactgcaacctccgccttctgggttcacgccattctcctgcgtcagcctcccaagtagctgggactacaggtgcctgccaccacactggctaattttttctatttttagtacagatgaggtttcacatgttagccaggatggtcttgatctcctgaccttgtgatccgcccacctcggcctcccaaagtgctgggattacaggcgtgagccaccacaccyggccaggtcactcattttttaagtgaatattttcatttccaaaaaaaaaaaaaaaagcctcatgtttccaaagtggcataaaaggccctggcatgtagagtgtagaacagaggctcctcctttttagccagtctctatttcagaaatcattagatagaacatacttggtctgaaaaaaaactatgaaattttgatcccccttggagaaaatgtactttaatgtgtatattagttttcatttccttcctctgatacagtaaagtcaaaattttgcgaaccattgtgaaataaggagatatgaccccataaacacaaacaattttcgttcccttgttcctacatatgtttgttaggagtacataaaagacaagttagctctatagaccctctaattttgagaaagagaagcacagcattttcctctttgattctgttttgaaagagtgcacataatgatgcatacctcatgcttgtctgccttcccctggactttaatttcttcctgtccagccaaaggagaaggtttttggcttggtttcagctgtgcttccatagctgctacacatcaaacctatcctaccaggtagagactagtgtattcttttcactgagggtagatggtcttctaactttaatcttccattctgcctgtcacgtctagaatctatctggttaaaactcacgttttaaaaatgcatgtcctaaattgtatccaacacttgttagtatcaattattatcataatttaaagcctagattgcagatgttcatcgtaatactttgccaatattcttatgactgtttcttttttcccatagataagtgttccaatttaagtgtgttttcctttccagaatgttctgtatgtaactcttctgacatttcagagattgtgttattactaatatttagtctcgtgaggtgcttcattttttaaagtattctttattgtgttttttcttcatgacccatcatggtgctcgatcagttccttgttttttcttttgagcatgactaataataataaagtctgagctctggtctcatatcacatattttaattgtataaaacaactatgaagacccacactgacaagatcctgagcctaaataaaattaggtcatgtctaaaagatattgtcctttgaattaagcagaaygtgtgggtgtgtgcacatgtgtgagagagagggagagtttgctcacacacagccttgacactgataatattttcccagacagcttctactcagtgactttgtagtaaaatcaaaggagctttagtgtgtactcattttacagattagaatagtagagcccagagagagtaagttatttgcctgaaatcccacagcgagggtccacgggagctaggactctggctttcaggaccctccttgttcagtcctctttactttgagtcaactctgacgggacctggcatggtgccctgcaattactgatgatgcgaaaggtgagagcggatgaaattttagcacactgatcaatcttgagatactaaaatataccagcaaagttgtgaactcgaaaattactaaacaggctgggcatggtggctcatgcctgtaatctcagcactttgggaggtcgaggaatgagattgcttgagcccaggagtttgagatcatcctaggcaacaagaacaacaacaaaaaacaattagttgggsatggtggcgcatatctgtaatcccagctactgaggaggctgaggcagaagaatcgcttgkacctgggagttcaaggctgcagtgagctatgatggtgccactgcactccagcatgggtgacagagtgagaccctctctcagaaaaaagaaggaaagaaagagagagagggtgagagagagagagaggaaggaaggaaggagaaaagaaaagaaaagaaaaaaagaaaaagactgaacaaaacttgagaaaagcaatgtacccttatcacagttttatgggaaagtacacaaatgagtaaaatgcaaaataatggcattttctgtactgagaacagagataccacagagcaatcgaggaagaattagttatactgttctctgttggattacaaagcagaattctgaaaagcacacgttgtttgacacgcagtgtgaagttgcttgacgttcactgtgatgttggctgggacactgtgccgggtatgtgtgggtctacagattcatcaaatggcacatggtcagaacgaccttctttttgctaatgtcattaagtgccatctattaaaaatcaggtgcttacaaatgagagtatttaaagaatcagagggagcaaggtattatgtgtccccttgttatcaaactatattatccaaataaggatatgatataatcaagccaattctaaacagtccaaaggcaaaacaaaagaatgtgcccagtgctttcagccagtgtctggatgctaaaaatcagactgactagtcaatgaaagcgaccacaaaattagatgattttgacccaaaagaatgccttggcctcccttcccagagtgtttgccagttttccatgtctgctcttcccctcttcacccccagccccaggtggaaatgaagatggttttccattttgttttgaagagagagcttcatgtcactgatctataatgtgaaggaaaatatcttcatcaaaaccaacattcttaggaatacatagaaaataaaaagactactcatgtcttagaaaagttttcccaaaagttggatcatgtkggataatgttatgatccttttcactttcaaagttccctagttcccttagagaggggaaaattatattactggtagaaatcaacatttccttttctttagtgaaaaaaataacacagcactctttaattgaaacctgtgtatctttgccctccccactttctgcctttgctttttcattcacatttaactcctgcagcaacaataacctctgggctgttctgcattagagagaactcaagagccctggaaattataatttcagaagtattgataatattaaacaacatcaaaaatttttaccacttttgcctgcccttcttacttttttcacaagttaattgaagatggaaggcagtaaagcctcgtgattctttttcaaaaaggttaaaawacaatataatcyatcttttttttttttttttttttttgacacagagtcgtgctcttgttgcccaggctggagtgcaatggcgcaatcttgactcaytacaacctccgcctcccaggctcaagcaattctcctgcctcagcctccaagtagctgggattacaggcgtgcgccaccgcacccagctaagttttgtgtttttagtagagacggggttttaccctgttgccaaggctgatctcaaaactyttgacatcaggtgatccacccacctcgacttcccaaagtgctgggattacaggcgtgagccaccgcgcctggccaaagtaatctatctttaaagatggtctgctatccttaattgtgtatttggtataggttaatagagtgaaagtcctgtaagctataggattagatggacgttgcctgcaattcaattccatctgtagagcagatttcattgtcacattaaacattagaacttaagaaacaagttcttcagagaagtggattgagaaagattgaagtagtattgtgtgagctgagcttgagtcagctattctgttggagaatccctaggttacatcagagaagatagccgtgggctagtcacctctatgagctttgtcatggctataattttcatcaccagtcagtccttcaaatagatatttcttagagatgcatgggtaattagagaaactctcaattcagttattaaatttttcctactcatatccagagttaactgctcatttttagcttgaacaaattagaggattgcttagtgctgaatactwgtctctttgttctataagcttgacagagctttcttattgcctatatgataatgttggaccatcttcaagtgtctacagtctttcctggggctggtatggtgctccagcataaatgcataaatgtgtaatgcagtggaatttcaactcagtgataaaattctctaaaagagagaactaattaattttagagccagaaagaggcctatatccaacctatttatgtatgtgctagagctggttastacagagcaaattagagaccaataaaaagacatggtgatcacttcaaattgaactgtcttaacagaaataaattgcagaagcagataagattttcacaaatcagtgcagtatggccctgttactttttatagcatctggattatggcttagacttattaagaattagaaaaacaaatttcagtgccatcactgatacctcaatataatatgggacaagctgttagacatcaatatgctgaaaaatggccaggcatggtggttcacgcctgtaatcccagcactttgggaggccaaggcaggcagatcacgaggtcaagagatcgtgaccatcctggccaacatggtgaaatctcatctctactaaaaatacaaaaattagctgagcatggtggcacatgcctgtagtcccagctactcgggaggctgaggcaggagaatcacttgaacccaggaggcagaggttgcagtgagccgagattgcaccamtgccctccagcctgatgacagcgagactccatctcaaaaaaaaaaaaaatatatgaaaaggtaacagcaattttcagtgagtaagcatataagtaaaggataaggagagaattgcctcttttctgtcgcattcaaggaacagctggaaaatggaagaaacatagaaggagagaaacatcaagaaatacgtattagtcattccactgtaggaaaagttcattacaggagagtcatgcaggcagacagggtcttcttagtatcaaggactgattttgataatgtgcccacatttcagcgagggcgttttaagacataagcacagcattaaggtgtttcaatagcagacatacctgtctttattgcagtggggagaaagcccaggctcatgaaagaggcgtgagcattcacgggaaggaagaaagaccaaataaaggcctaggaggaggtgagccggggaactgtacaagggagcaaaggccccttcttcagatgagttcaggatggccttagcaccagtgcttggggaagaatggctcacatcctctatggcttaccctcttcttccaaggctaattttggaggctttctagtctttcttttgggatcaaatatatcatgaaattgaaacaataaaaccaccccccatagagctgttacttggttttcacttttcatataatattaaaatctcaggactaggagcgatttccagaagctattaagtctaaccactacctccagacagaacttcacctagatagactaagggaatgtattccttattgaaaatatattccacctcattcatttacaaataaggtgtaaaccttcctggaaaaaaattcacaagtgccattataaatgcttctatggataaagaccttaaagctaacccaaagttattttgccacatatacttaggtgtcttaaataaataatatgcattctctcgattccatccttgtgaatttgcatttgggttcccacttcttcaaaagagagtgtgtttgttccatggccaattagtttgatagtacatataagtaattttgcatggataaaaactaaccatgcaactttaactctgcctttaattaagtaatcattaaaaatgaaacttgtctacttcctcctgttctgtagttgacggtgattgaggggcttggtatggctgtagtggcacaaaaatggaaatcagtaaattagagcagttgtcagacccagattctgattagctaaacagcttgcctgggttagtgattaatgcagttgtagggaatgaaatctgctttcctagaaaagtcaatagagaacgtttaatgaagtagaattatgtgacagttgtccagttgtgtgaaccatctttgaacttagtcaaatgcagatgtaattttatattaagactttaaaagaatggaaaaatggcttcaaacataggagaacaaaattttctgctttctttgtttacttcttattttatgtcaccccataaatgtgattggtacggcttttgagattattggtttagaatttcttaccctttgttgtcytgagccatcttttctctagaaacatgctaatattacagatggttcaaatgttcctataatgtcaatgtgtaaatccatattgagcaatgtagaggtccggctgtgaataggacaaagaaaaaattaagaaaatatttaaatgtacatacctccttttctaggatttaataactcgaattatttataaaatgttattgacaactttattaaaagtataagttacacgttataagattcacacttcaaagtgtacgattcagtgtttttagtaaagtcacaatgttgtacaactcattaccactatctaactccaggatattttcctcattccaaaaacaaacctcatacccattagcagaccccctcccatttcctctttccaccctttccccagctattcaagttattttttaagcagatgttctgattaaaactctgtatctgtctttggtgctttagctagcaaaaaaataatgaatataaaacaattgcctccccatatatattggtatatataatttattagaatgtttttcttttcacttttaatgaaataataatgaaatttcaatatgtataactggtgaaataatttyggcaatactgtgagtgaaatgatagggcaaaaatgaatgcttttatttaactcacaattgatataaacaaaaaaatcaaatgatccagtcaggtcgagggtaaattctcttaaggaaataacaggtaaatacttttccttgagtgtaaagacacttatgtgtatttattaacacatacatagaatttagataagaattatctttaaaaatatgcatccttttaaatttattcaactagtattatcttttcactacaaacacaataaatcctggttttgcttgcctccactagtcgatatcttgagttaatcttgcacatcagctgaaagaatagagttaaagtttgtatctatgaatagaaggacttgataaactatttgataatgtaaataagagtagaaagggaatatgtagtgtattatgctaagatagtatatgtaattcatgtgagtgagcacactgatacattttaagataagcaagtgccagattaatgcatattcttgccctgattccttttcatcccctttcccttcatttcctcccctttcccatcctcttccctttagacccttgtcacactgacctgcattcacttactggaactggctatgtcccctcctgcctctgggtcttcaagcaaggcctctcctctgcatgtcttaacccaatccgcacacctcccacaccatgctggccctttgcttacttaaattaacttatcatccttcaaatttcaactcagtagtacttcccctagaagccttttggaactttccagaagtcgggtcctgttcatgttctcagagcaccctgattttttggaagtaacattcatgcttctatcctcatcttctctattttcaaagaagaatcaaagaatgtatgtatattctaatatatattgtgtaagtatactaatgattcaatatctttttagaaaatctgcaattttggactttttagtaagtcagacatcttttgcttctgagaaatctgaactattttattttgttatgactgtgacattcattccatgtgttgaaatcaagacacaagaatgcaagaaatgacgacttgccagtaaatgcccagttttcactattaaaaaaagcctggcattgctctcccagaagaataacaactcagtgatagaggggcgtaaagaccatggggccagcatatttgaaggtgatttttaaatattaactgttgtggtcttcaatgtgagtaagcctgcatttttcaaaaggtttcatatcttacaaactcctgatttctccctttattaaaatctattttgaagtaggccaagctgtcaactaaagtgaatgttttcaactaaaagatgattcactttctaacttgacaaaaataaatggagaaaattatagattatagatcaattatcactttctaatttatctctatgatttcaccctgatttattccatgaacaatttaaggtattttaactatctgacattcatttagttgaacaaaaagaaaacgtgaaaccttggtaaataagggacccccttaaactgaaactttcctaagtacatttgaaagtccataaactgacaatggataccaagatcatgagatcacaaatgtgacttttccttaagatttcatcacaagataaatcaaagtgctaggaattgtattttcccttttcctagtaatcaagtatccttctcagatgactctttttgtaaaagtaacaacttctcatctttgagacttgactcacataccaaatatcaaaaatggaaaatctttgaattctttktcctgttgtgggaatacgagtcatttataacaacaaaaaaaatcgataggaaatggatgttttagggaagtgtatcctgagtgctgtctttaaggcattgattggagactgcccacatctaaaaaatgactctaggacatcactctcatgtatttccgtgaaaaagctggtggaaaaatgtgttttcttctaaaaggctatgtgtgggacgtgtgtcagtgttcacatgtgcctaataggcatacgtaaaatcacacttgtatgaaaatcaagtaaatctgctgaaataaacagcaacccatgtttggggcatttgtrttggtagagattggcttttaaaggagaatggattaatatatgattctcttgtcggtattactatgaattgttcttttttgaggaggagtctcgccttgtggcccaggctggagtgcagtggtgcagtcttggctaactaccacctcctcctcctgggttcaagcgattctcctgcctcagcctgctgwgtagctgggattacaggcacatacaatccacacccggttaacttttgtatttttagtagagaagggtttcgctctgttggccaggctggtctctaattcctgacctgatctgccttcctcggcctcccaaagtgctgggattacaggtgtgagccaccatgccaggcctgaattttcacttgcaaaattatcagtcagttcttaaaacttgaggaagggaggagtcaagaaaatgaggtgaatgagaaggctgtttagactgtttttattgtcttacagtcccatttttgtctttcactcttccttctctctaatggctgggttttcaacaataatacaggcaagcataaaagttagcaaatgagggctaacctagaattgcaaatttgattgggtttcatgttggttttccttaaataaatcaacagttttaacagggtggcatttaattatatttgtttacagaaatatttttatatttgaatttctttcataacagtgtttattgtggtcaaaggatgggagggatgaggaaataatatttgaagaccacaggggcattcctcacctctgtagtcttattatctggccttgaaacactacgacattctttaactgaatttattaggggctraataccaacaacataagtcagaaaagggtttacattgacccctttggattctaaatattgtaataaatattattagttccgaaatatcatatctgtttgatttcccaaatgattgcagaaawgcttygatctttttagtcctatratattgtagagatatctcactaaygatgttttttttttttttktaagatrgagtctcgctgtgtcgctcaggctrgagtgcartgagccatgtttrtgccactgcactgtagcctgggtgacagagcgagaccctgtctacaaaaaaaaaagaaaagaaaagaaaagaaaaaaagaaatgtaattcactttcttctggtcagcagctgacaggatagaacacattggactagaaacctgttgtattcttacttttacccatgacatggcttcttttagaatacaaactgtttagaactaagacaggaaaatttaacaaagcattagatataaaaatgttcacaacatgtatggtctattctttaatttgagaatattttaagaaaatttgtggttgaaagctattgctgtcattgaggtggtgttacaacacaatcgatctttgaaaaagtattggcttcaccagggaaacactagacctctaccccagtgactcctgctaaagaggtctttgccatcgctgccctttctgatacctttgtgtgtgctcagattggcacactgattaatttcagataccatcagcaaaaatggaatatgctgaacaagcacttacaaagtagtggttcttcatagaacagagttgtagcccttcagtaacaaagaatgagtcagaggaaatgagttaatttaacaaattgctagttgcctaccagatatcatagcaaggaatgatatatgcaaggtgtgttaaaggcaatgtttccttaatttcttctttctatctcccatctcccaatgtcctctggggaggccgtagaggtgggagggacatattwagtaaaaagtgtgaccacttgctgagtaatttttagtgatttgttgagctggattaagtgaatttagagttgaatcttcaaaatgatcatttcctttttttaagagtttatattctggatattttcatttgaagagcagtgatagtatccggctaaggtttactaaattgttcaagtgagtttgcagaagactaagtgaaacaacttctgtataatgaactggaagattaatctgcatatcacataagcaaataaaaaacaagcaatcatatattttataatggaacaaccgtaagataaacaaacaaaaggcatagttaaaaatctgtatgaaaaagcaaattcttggtttcccaagaatccttggtttcccaaggctcaagaattttatgatttgagaaaaatacttaagtgttgcctgcacttctgtgcaataaatctcattatttcatactttattgccactactgtcatgaaattaatggatcacatttaagtattccttcttggaaaaatatcactaaaatgtaatgttcctcaagtcatagtgcaaacaaaattatatttatcatttacagacaggttttattggtcctggtgcattcatctgctgatggccaataaaagctatacaaagtctcatcaatgaaattagtaatctgtggggacaaacatgccattagtgcctgtcattygagatttgtgatcattgacgtgctttttatggcatctgaaaatattagtttgactttaaaaaatgtagagttgtttctattgttggatatatttataaaattctgaacataaaaatgctctttggtagccacttgaatttttaaaactatatttaataaaatacagcttttaggaatagcaatcagcatgggataggtgacaatgaattttttttttttttttttgagacggagtctcgctgtgtcgcccaggctggagtgcagtggcgagatctcgctcactgcaagctccacctcccgggttcacacctttctcctgcctcagcctcccgaatagctgggamtacaggctccagccaccacacccgggtaattttttgtatttttagtagagatggggtttcaccatgttagccaggatggtcttgatctcctgaccttgtgatctgcccgcctcggcctcccaaagtgctgagattacaggcgtgagccaccgcgcccggccaagtgacaatgtattttaagtagcctctgctatccttgacgaaatgtgctaaagtggcaaaatgtttgctttagagatgtacaaaagtagaaaatttgtgaaggacattaggtgtttctccactttgagaggggatctcctcttgatctactctttatttcccatcccagagtgaacaaggtactagttgatgaattcgaatcaggatacttgaaattaagacttagatgtagcactttgtgatctgtaaaaatcatatcagatcttaaatatgaaaatgtttgagtttagccaaaatcaccagcatcattggtgtatatcaagtttaatcctatccttggaataatagaacttcaaggttggaagatgaatcttgaatagtttgaagttaaaccctacctgccgttgcaatgagtcccattgaaaaacatttcctacatgtcctcgacaagtctttgctttctttagttacaaggaattgcccaacctaccaaggcttccccattttatctttgactatttctataaatttctttttaaaaattgtggccatattttaagacacagagggagggtagacacctagatctaaaggatattaatctacttaagaggaatttgcttatggaaagatgatctagcaaatgagataaactggactgataaaaattatccaaactcaggtttagatgcctatagcagtttcacaaaaactaaatctttgtctctaatggatctgagctgatagcagtgtagtagagaccaaaggtctgtgactgtcgtggagaagccccttttggatgaagctttacggaggattttcaaatgttaattatatttacaaacagatcagatgtaggcatagatatattagaatactttatatcttctctcatttatttttctactgctagataaatgggacttataagtagctgagtaggcaaacaagaaagaatgcatacagttttatcartttatctgagattttgtgataagctacagaccaagtcaaatggactagttttggcaggggcttgctgtccatatgatggtcagttagcttttttctgagttaaacttgaaaactaagaactttaagaagtgcatgggtatatataggtgtgtgtgtgtgtgtgtgtttgtgtgtmattttacaagactgtagaattataaaatgacatttgttttaaggaatatttgattgacagtttcacttaccaacgttagcctctaattatgacactgaggatacccaaatttaaaaatttcctttataatggtccctgagacctggtgattgaggtcataaaaaaggaatggtagttttctttcagaattttaaattttctcaaataatatttcaccaaatattagccacacttgtatactttgactctgttggtcgttaaaatgtatagtcataattamtcctatggaatagggatttcaatagaaagaaagctttagaaatgaatcttctttgcagataaatgctatttaattttcagagttaatataattcaaattatttagaagtttacaagattctattataaagccagtttatttatttttttaattccattatcatctgaatattctaaaaaatgtaaaaagaaatctatttgtagagaaaacaatgccttttaaagaaaaatgtattttgtgctgggctgcagtcttattcatcacttgataaatgatgcttttaattcagataattagagtaatttgtaacaaattattagatatagcagacttgccattccatttctataaaataaaaatacattgtaatgtttacattgatgagtaataataacaacaccttagtagttgtaacaatatatgacctaaaatcagtggtaataatgtcctatgataagaagattgtacaaacttaaaagctagattttctttcaaatcttttgtcatactcctgagagaaagatatgaggggaaaaaagtcactatagcaaaatgccttctcagaactgtttcagagcaattgaggggagaaggaaagaatcagtcagagattgtttcaaatttaatatgaaataaactgttacctttaactattcagcaatgacacagttatatttcattccaaaggtgtttacaatcatatgagtgggtttctgtattcaatgttacaataagtcaacttggaatttcccattaaatatgatattaataaaagatttaggtacagtcccctggtgtgtttgaagctgtgcactctgcaaacacataaataaaaatatatctaattggtttgtggcattttgagattttttttttcagaaggaatgtacttaaaaaaattaaattactgcagttttctttcagaaaattgggcttttgtattaaataatgctagtccaaacttaaaaataagaatatttaagcctggtaagcatctttgttctctcaataaaaagaaaaaaattagagactctctttctccctggcctcatacccccatcatcttctgaagttatatgtatatgaagtattttttttaatctacagggataccttttaaataaaatattcctttattatcataaataatctgtaaaacaaaataatagtggcagtatttgtaataaagtcctaaaagttaaatcatccttattatacttaacataatccaaaagactcctaattaagttttcctttcctaacttatattatcttatgatgatctacaataattttgatgatgttctcaaatgttcttatatctgcttctgaaatagttaaacagattattgaaaaagacctctgaaacaaagcaaataaaataatgcatagaaggaaacagcttttagtcttatctctaatggaatcatgttattgagttttctaaattatggaagatgtcaaaggtcatttagagctagacttcatgtgaagaattcttaacttgaattggcttcagaaaaagaggtccatgaaactccaaaattgtatgcttggtttttatttgtacatgtaaacaaaaattgatagctttccccaaattctgaaaggagtccttagctctcaaaatactgagaacctccattgaataagacatttgagtagggactttgtggtcagagatctgagtttgaatcccagctctgctattttccacctgtagggtcttggcaaactcctaatctgtctgagatattgtttactttctaataagtgcaggtaaataatacagaatttacaggttattgtgagagcctatgagatcatgtgtatttttgccctggcatgttgaagtcacacaataattctttcctttctctcggtttctctcttttaagatgacaggaatggttagctaaagcaactgagtgttaacatgagggttcctgctctattgcttgttatcacacatgggtacatataacagtgactgcctataggaagaagtcattaccccgggacagctttcactggtggatttttatgatggaaagcaaccgcattaactgcaatatggcccagggtgacacttgacatctgtatgttttatttttattaaaaaagtaatttaaattattgccttttctttttattatggaagaaaatgtaagaatgttgactgttcactaagccgaagattccctttttgctttcaaagcttttctcaaggacattaaacactcttcctaattactttttattgatttcttgacatttctactcaacattgactgcttatttttaggaaacaaagaagcctaagtgaaaaatgttaatggtgcatttgaaactacaaarttcaatattttagtcacgcctcttatatgtaattgtaggtaaaaactatataatatttttgccatgtgcctcagctctcttatcaccgaagtaaatagaaaattctgtgattctcagatttcttccatagctttaacttattttgaacaaatctgtgacttaccttgctatatttcaaattttattttattattattcatttttatttttatttttttgaaacagggcctcactccattgccccagctggagtacagtggcatgaactacagcctcaatttcctgggctcaaatgatcctcccacctcagcctctcaagtggctgggamtatgggcccataccaccatgcccggctaatttttaaattgttttatttgtagagatggggtctggtactactatgttgcccaggctggtctcgaactcctaggctcaagcaatcctcctgcctcagcctcccaaagtgctgggataataggtgtgagccaatgagcctggcatattttattatatatatattttttgtctcaagaggttctgagaacatgtgtgcctgtatttcaaattttaaatgagtgaagataaggcttggcatagtcaattgaataaaatttagtaaaaaatcaacggaatactgaagagactgatgaaaattacacaaattaactcacattttacattgttcttccaattttgcagttatttgccattagtaaacactttaaatatgtctgccactctgatttttagcattatttttgttaggagtaactatgtaaagcaagtctgattagatgatcctcatatgtaatttaaccaaacgaaagatgtcttatgttaactatttagaacagcccatttatttaaatgttgctcatttaaattacttgacagtcaggaattaacttttaattaaggagtgctaccatcagacctatttttaagagttttcttgtgtgtgatttgcatgttatatacaaatgaggttaaagaaaattacaagtcaacaaaatgaacctaacatcaaatgtccctggagataatttttttattttatgtaatttatctgcatctcttatagaaatactttttttgtcttttctccctatctctttgttgtgtacaatcagcttttaaaggatccagtggtattaattttgcattgcggtcaatcagagatcttatgcaaatattaaatattgcacaggcatcataactaaatttagcrtttcatttggaatagttccttgtgccataactccctgatggtgtttataactcagcatatttatatttgtatgtgcatttttatgtatatgcatttctctttggtctcataaaaaagtaaagtgtgtatttttttctaactctacagtcattactaaatgaaaattaagttgtttttaaggcatattttttaaaaggaaaatgatgttaatctgaatgaaggttaaatagaatcccttataacactctggcactatgtggtcacatcattgaatttctgataactttcatattatactttagtctaactactcaagatcagtttagttttctagtgtttaggaaagcttaatgaaaaatataagacaacagacaactagaaaactagacagataaactgaaacagacaacagaaaactagataatatagacagagcgttttccgtgaatgaaaactaaaatgcatcagtttgactcacagtggcctcctgccttctgctaagtatgcacaacctaaaggtaatattttaagtctcattctctgacaatgtagtttgcaaacatagagaaatattcagatgtagaagaatatggcttctctaatggccttgtttgtttttagctacaaggtgacatatatagttctggaatgaaagaggcgtcatcgggcagaatatttcagtggctgtattatgggcctagcaagtaacctgccttggaattcctctttattattttgagaacaaaggcatgccatttaacttttttcagcctcagttttttttttttttttccaactgtgagaaagagaaagtgtcacctatttcttgttaaggactaaaggtgttaaaatgctagaatgtctggcacatagtagatatttaatgaatgtcagtttatcttgtcttagctaagaattttcatgctttactatacagataactcttggattttatctgcattcatttcttctccaaaaaaagggaaccaggaagaagagaagcaaaagacataactttacaatgcctagctaacattatcaatgccaaacacctactggtcgtggtaaaaatgatttctacttcaaaagacaagattgctgtaaaaaatcattgctacactatgaagttatgctgtaatgttacgctatgaatttgttgtgctataaagaggaaagaagatgtttaagaacaaaacatgctatccagagcacacctccatttttgcaattacaaaatgtcttctttctttgcttctcatttctccagttcctccctcgtgacctaccttgaagatcacctataagcagaacatgataaatagcatgcccagtagaaatggtagttgtgagcacatttaaagtgctctgtgatgttttactctcagctgtattgaaatatagttggtgatgactcattctagaaatatgactattaagaatgagtacatttatttcttcaataataagaaaaccaacagaatggtaatcccagaatcttagttctacttttaacatttcacacccagtaagttggataacggatggcagagtgagcctgcgtaggtaataacttattattattacccttaccgtacatggcccttttccttgtacttttctccttgagccaataatgactttgatggttcagtctttctgcactttgtagaaaccatatcccaaacagtattttctagacatcarttctagcatgtgaaagaatctagacagcctctccgattttcatgcttctgggacagaaaagtatttatcacaggtaatgatgataatccagttaaatttgttatgcctttccttactttcaaagttaatttccatttttccattttggatgctgtgttttatggaaattgtctgtaaagagtctactagccttacatgtaatggtcagcagacatatttgatacctttctttttcctttagtaaaaggagttgtaagtaaggagcaagtgaaaagtgaaggggaatttagtatgtctcctatttggcagcaactgcgcatgctattcaatctttaaataatttttaaggaacttgtctcttattgtaaattatgtctggagaattagaagtgctacacataaaaattctgtctttggaatcagtacagatccatgttaacctcgttaaaatgatgacttctcatctaacttcaaatattcatttttaccttattaagtcatagagtttagctaagcactgagggtatgtcctytttgttattttgattctgaaatcctcctgatggtttttagggtagttatggttaagattttggtgccacgcctgatatttcctaccattactgtggtagtgatggatttcttctgtctggacctccgcttctagtggttctctgatctaagcatggttggaactttgtactgacctcatactatgcctagtcacagagcttgtaaaatacagccaaaattttattaattcagctatatctcttatctctagaattggatcatccatggctcctctgtcagagttgtgaaaatggtcagctttgttacgttgagcctgaagcactgatcccacaaatcaaaagaccacgtgactcaattcctagctcagtcatcttttctctttcgacctttgtgtatatacttagtgtacctgtctctcgaaagtgattccagcaacatagattacataccccacttaacagattaaatttcattagacttatcaacgaagatcctttgttgccatattgctgctatgatagtcctatataggaaactccagcttcccatcaggatttgaagctagactttaccataaattgcaacagctgccagcctgttgacccaagaaatgtggtgcattcaaaaagaaggaacaaactcagacaagtaaccagctctgtacatcaaaaatccttccggtttcggtaaactatcctgtgactatctaactttagtccctgaagggtattacgccttatttaccttacaaaactggcatcctagaccttcctaattgagttgaacttcaaattcattgtctaaatcctaagaaatgttgaattttcacaaaccccatttcctgcctgctctctccttttctcccatacatccaccatcagatttttttttgtttactttctctctgataattcatgagtaagtttaaaaaaaaaaaaatgtgtggccagagttttctgttttctgtaratattgctgtgggtttgcccatgcctagttccaacttttaaataaatatatataataatatatttatgttataaatatataatatatttgttataaatatattatatatttatataattaaaatcttatatgtaattataacataaatatatatgatattatatacatatatatatttctttttttttgagatggaatctcgctctgtcaccctggctggagtgcagcggtgcgatctcagctcactgcaacttctgcttctagggttcaagcaattytcctgcctcagcctccccagtagctgggattacaggcacacaccaccatgcccagctaatttttgtatttttggtagagacggggtttcaccatgttgagcaagcttgtctcaaactcctgacctcaagtgatctgccgacctcggcctcccaaagtgctgggattacaagtgtgagcccctccacccaaccgaaaagaaatattttgatgctatgaatgcatttgtcatttctattctgtttcatccatgtgttcttcttgtttacctttgtagtagtcatttacagtgaaaataattgacaaatgacatggtgttatgttcttgaaaacaaacatacaaacaaaaacaaaaaatgaaagcagacaaatgamcaaaatggccaagtaggtgtttaaaggcttaaattgagcaaagaataaaatggtattttttaaatgttaaagaatgatgatgtgttttaatagtattgttaactattgaatcaatttatgtttagtctgcttaaaattatattttggattcaagatggactactgctatcaattgattagattgaaaacaagcaagcaagaatctagacracacaaatgggggaaaaaataatgagatgtattggacactttcctggctgtaggaaaagagctttgataaaaggagtgatgagatataattaagcacaaagtaacctacatgcttatttatcagtgaatctttcagttccagatcatttcttctacaaaaaactaaagaataaaaatcagtctttcagtcactgggtgacaggatgcactttgatttttccaggaaaggaaagccaggatcacaggcatgcgcatgcacacacacacaaacacacacatgcacactcacacatacacacacaagctcaagcgcgtgcacgcacagtactttggcaagtagagtgttagctccccaagcatgagcttcaggccagactcagtggctgtgatagacccatgcagccatttgacagattttgataacctttttattcaaagcagcatgaagggccaatgaaggattgctgatttttttttaagacaggatcttgctctgttgcccaggctggagtgtagtggcacaaacatggctcactttaactttgaactcctggacctcagtttcccaagtagctgggaccacaggcacgcaccaccatgctcagctaatttttaaaattgttgtaaagacagggcctcaccatgttgcccaggctggttgaamtcctgtgctyttgccatccacccgcctcagcctctgaaagtgctgggattacacgtgtgaacaactacacccaactggattgctgaatttttataacatgtctctggtaactaagatcctttgaactatgaccattgaattcctaggacttgtgtgatctcagtagagcaatgactcacttccctcaggttttcagacttagaggaaaatccaaggatcagtctgtagtataatgctaggcatgaaaggcatgaggaaatgatgggagcctccagacagaaaaggtmtcccactggtgactgatttctattcagagacaatgccatccctgtgattgaagctccaacacactgaaaaggtgtgaaaccaagaaaagtctctctttcaataaaagttttccatatttcaaaaattttcagaagtaaggatttcttaagggaaaagccatgaataaatcaggccctttttttttttttttgagacagagtcttgctctgtcgcccaggctggagtgcaatgatgtgatcttggctcactacagcctccgcctccctggttcaagtgattctcctgcctcagcctcctgagtagctgagtagcctcctgaggcgtgtgccaccacacccatctaatttttgtatttttagtagagatggggttttgcaatattggtcaggctggtyttgaaytccgaaccttgtgatctgcctgccttggcctcccaaagtgctgggattacaggcgtgagccatcgtgcctggcctaaaccaggcctttttaaagaataggatcagaggtctggtttcttcttcttagcaaggtcttgttttcctggtaaggccttgttttctgcttagaggcatcactacaaccagcctgtcatctgtgaactcttcccttggtgggattcagaagtgtagctcctgcatatgtctctccattatgggagtcactggattctgtggttatttaattagaacatgcctcactaggtgttggctacacctatttgagctgaactagaaatgcaaattcctgctacacrtattttgcattacaaagtgttctactttttgaaagcttttgagtaaatggcaaatctcaactgaagactttgactcttctacaggaactgcatggaaatgtgaggaaccgaattggaagaatgaacacagcctaccatttggttttcaatgctttgatttttaggtggctttgtagtaatggatggaaagaacaaagatctgtattaaacacatgcttgcagcgtctacaaaaatggtttatgttttaaaagaagcrggggaagacctcagtcattctgagttattacagctccaggagatggaagtgttttattagcccatatatatatagatagatacagtgctaccaggaaaaaactaatgaattataactaaggtcctwtgtatggaccttaatattccttgtgtctgacgatgcaggaatttagccaggcaagctgagataaggccctaacctttgctctacttttctttttatgatcttyttccacatgcccttttttggtttaaatataaccaagatgatttccattagatttttctaacaactgcatgatgtgtgtgcgtgcgtgtgtgcatgtgtgtgtgtgcatgtgcgtgtgtgtgtgtgtgtgtgtgcatagcagcaaagccagatgatgatagcaggatgcagaaccccaattttttttaatattatgtaatgtagaaaaggagtgtgcacacctgtttgcttccttcccattgaacaacattaggttgaaagccaacagtagaaaaacaggtgcttgttatgtttgagtgtggagccccaaaaatggaaaaagaagaaaaagaaaaagcaccgggttttagggaaggcttctttaggcataatgtaaagttaatttatcattttggccctgttccactaaagacacagaatttgcrgcaatactacctccccatggcctatttctctgaactaaaatgtacattttctttagagaagcaagaactattatgaccagctagtcctggttttgggtggcgggggtggcaagaaaaaaaaggaaatcgttttctttaagtaaagcacttaaaattatatgtttttttgaaactggttttattcctgttcagattggtcatgagtgaaatgacgtagagtactttaaaaagttagattttcatgtgttatttggttaccatagaatttgtactggaaacctaacagcagatatacatttaataacacaatgtattacagggagacatgttttgctactctgatcgtgaacttgggaacaaggaactcctgggagttgtgggaaaatatatggactgaaattagccaagtgttatggagcaagattcatatgctcaaacctacttttactgcttcgttgctttccgtgcagcaatttctggcctcagtgaggaaaatgttgtgtttgtggaaacataaactggctatttatgtccacaaccatcacacaaacacagaactgcagtgatttggctaaatggtatatagcaacgtgcagtctggggttttagagaggcgtgtttcaagctgcatgggcgacattctaaggaatattaggctttttacctgcaaagccactgttcaaagaggcctggctcaaacccgaaacacttggaagattgtgtctaaatcctagaacccactttttgctacacttttagggaggctccttgcctcaaagtactgaaagtttagattgtttaaaacatttgtcagaaatcatttcctgggagtgaagatgcttctataactcataggcacatcactgccttcatcatctctgtaaaaaacatatcatttcaagccaactatggtattgtccatcttaatgggatcctttatatcaacagacacgtagtctagtgagattaggaaagcacagtgacagctttacctgtaacagacgttttagtgttaccggtgagtattgcatattgagaatgggcctcagttcctctgttaacatgatgagtgtttcctagattgcgtgaagagtaatgagaaaatgtgtgataagcagtttgaatgcctttgaaagaggtgtagtacaaggtgtgaaatacaaaggaactccagcagttagctcttctcaaattttcatgtatataaatataaagtagtgtcatttcctgaatatgatccctattctttttccatcattttcttgcaaacactgttatcctcaaaccctcttctactctcacctccttcactagtctcatctccatgttttcccgttccaaaggctgcaggagagaccattagtttcattaattatggccctactcaaaagcctaactctcttcatggcctacatattaaacattaattccaaccagattatcaatggcttctctggtatggttgcattattattttatagcttcattaacttcacctccttatttataatccatgtcctagtcaaattgaactgctgcctctcaccaccaaacatgacatttactttcttacctccgcatttatttgttttttccctttagtggaatgccatcttctcccacaaccataggccaaattcaccttcttaatatatgactcttttaatatagttcccattctcacatttattgttaaattcatgcctgactgacctaactgattgatattttctgttgctgctgtgaatatgatcacattatttcactgggttttcttgatggttactactggtatccaaccatatcatctccagatcgtgattattttatcttctcatcttctaaagctgtatcataatttttttattcctgccttactgcattgattagaacttttaagagcaatgctgaatagtagcactgatagtcaatatcctttacttgtgtttgacagtcatggaaatctcccctagagtttcactgttaaggatcatttagattattagctaaaagcagatattcttagtgatacagaatatcattctagttttacaatataaagacatgttttgaaaaacctaaaatcattatatttttgcatttttaaattttaaatataaatataagcatatatttaaacaagtacatatataatatccatttaaacatgcatattaaaaacctgaaaatacaarggattgtgtaatgaatctccatgtagccatcacccacttcagccgttatcagttttgtttcatcttcatcccagtcatttcccttctctcttactattttatagcaaatcccagacatcttatcatttaatgtataaatatttcagtatgtatctctaaaagataaggactcttctatttttaaatatatccataacatgtttgacacacataaaaattaatgataaccccttaatattattattcattatctaatccatgatcagatttcctacatttgtaactgtttgaatcaggatctgaataaaattcacaaccattttgattggttgctatatttcctaatgctattttaagtgttgatattcgaatttttctccttttttcactctttgtttgattctagccctagctccctttgtctcttttttctacgtttaacttttttttaaagaaaccaggttgtttgtcctgtaaagttctctgggttttattgcatcccctcttgatgccacttaatttagtccctgttggttacatgtatgtggatgtttgattaaattcaggtttgatttttaaagataatactgaatagttttacaaaaaytgactttctaatttcatcaaaggttgattcggtatccattgaaatgaccatatgacttttatttgttgatgtgccatgatgtttttttttaaatttgttgaataagataatgaatttaccttatgatttctctcttttgacctttcagctactttcatttctaagtgggctttagttggtgaataaattaacatgtcattaaatgtcacatggtaatttcagtagcttgttgaataactgaatccttgattcttgttggatgttcagtcctctttgttttgatttgttttgcttggtacgaaagatttgactagtttggaaagtgacaggttaacattttctacattgacttgaccttcttccacccaaaatgatcctggtagaaaatgcagagtatagtaaagaatgtgtgccttccacatttagcctggtraggtctataaatatatcaaattaagccagtcagatggcctgctgatatttgctttgcaggctagacggattgtactcctttagaatctaagtattgatggaaaaagattcaagggacagcttgaaagtttgtggactccggctatggaaattttatactcatataaaactgtcagtgattagtagaaaatatgtagcagaactgtgtttctggaattggcttctcagctaagaaaagattattggctttgtgaagaagaaaatgtagctttcttgtaactccatttagtcaattatccactatgggaagatacttttcttcttctttggaaaagctatgacatcctccatggtattcgtatcattgagatgtttctcctgagaaatagtagacttaggatgattagactgtgccatgagtaaaatgcactgtctgaaaaaaacagaaaaaaaacagcaacttgtaggtttgaaaaataacctttcctggcaatcttattattctaaggataacactgtctaatgacaccaaatcatttgctcagccactgctgggaacttagaatctgctttctgtttagctacaaatgagatcagtgttacaacaaaaattataattttgttttatcaggagaaacacccaaaggtcacttttcattctgctgaataggaagaaatgatatcagggtctgcccagaaagcttgtaagggagaaaggaatcttacccacttaggaagcattttctaattcacttatgtgaccttgggcagccttcccctgtgcacttttgtgaattcttagctagaggtattttaytaaagactgcagaactattcttttgagatgatctgtatcctcctttaaaatataggataaactataaaatgtgctaagatccttgatagtcctatcattctatatatgtttgaacaatgccaaagcccaagttcatcagttaaaccagttaatctccattggcccttggtgtcaacttgttctttggacaaagtgtcaccttgtaggaagtctacaaacctctaagtgctcccagcgtattagctaagtcctgagctccatggagttggatgccctaattctgctttagaaagtcctrgttccattaaccgtctcctgagaattctcctggcttccctttttgtttcttgagcagagttcagtcaaggagaggtcaagagagatgatacattacttccagtcactgtattggctctgggaacctccaactctatgcaggttctttgatctcctctggccactttctttctttttcaagtacatatttgctattcagcaaaggattgaatgacttctcaggaaaaaatgccaacccagaatgacaaggcttccgtggttctgagcctggctctgaacctttcctttggaaaactaatgactccacctatcattcccttggcatctagagaagctacattaggtggcacagctctttctgctcagcttctgctccagagcttcatcttcaggaaccacctaagcatttttttccccagtaggagttcagtctgctcattatacctaattgcaaaggagctatattcagagcaagaataataatttcagattttttaactggacttcaaagagcaggaaagtatgcagattcctaaacacataagcattgaagatattacaggtaaggttaaaaaaaatctgtaattttgtagtgactagcagtttaatattcaaacatttaaaatgtgcatattttattaagcmaatggcgtagagttatttggtttaattttctgtaagtaactcgtaaagaattgtcctaaaagctgtgggtgaggactaattcattcaagggaaacaggatctaatgattgcyttgtgaggtatatatacactgtatactcatgctaattcctgctaattgtcaaagaagaatagtggctttttatcagcagtttgcatttgtgtaatggtcctggtctactggttttgtctacttcactgataaggaaaacaccacttaaaacaagcaagaaaagcaagccatcctttacagtattattttctttttagcctgtcttgagaagaaaaaaacctagccttctacaggaaatactgtttgattccatgggaaaatatttagtaacaagcagagaacacttgattatttctcagctatttattctgagtatttacaaaatgggcaatagtattatttccaaaatcttaagttgtaaacgaagtttatattacagtctacatgctatggatatgacactattttaaaatattttatactttaaaaaattgttataacacataatacataatattgtaagtaagtttaattcttgtaatttggaaattcagtcagaaatattaaagaattatgtagatcttgaaagggtaaaataatcctgcatttatgatattaatttctcttaaattgttcaattttattttataaggaaattaagtggttatacatttttgacaagtagttttgataaagttaaacacagattattgatatttacttaatgctttataatcactcaatgattgtcactccaaattaggccatcttttttcacattttgcagaagaataatttcctaagaaacaactattgaggcttggttatatatgtaacatttcagtctgggcagaatttctttttttacttttgtttgctcaatatttatgtcattagtaatagtaacagtatcatatatttgtgtgcagtgttgcaactgacaaagtgttttaataaacttggcaacaaccctttggtatctcatttttgcagctgaattttctaagacaggtagatagagagaagtcccacagctaataattggaaaattgtgccttggacctgattcttcccagccaacttcagtgttcatttcagtacattttatctatgaagggtttcttctagggagagttggtcatggtcttacaatttttaaccccagtgattttggttgttatcattatgtcttgcacataataaacagtcactaaagaattgtgggtcaggcgtggtggctcacgcctgtaatcccagcaatttgggaggctgaggtgggtggatcacgaggccaagagatggaaaccatcctggccaacatggtgaaaccccctctctactaaaatgccaaaaaaaaaaattagccgggtgtggtggcgcatggctgtagtaccagctagctactcaggaggctgaggcaggagaattgcttgaacctgggaggcagaggttgcagtgagccaagtttgtgccactgcactccagcctggcaacagagctagactccatctcaaaaaaaaaaaaaaaaaaaaaaaaaaaaaacaattgtggaaggaggtgaggaaggaaggacggaaataaggaaggagggaaagaaggaaggaaggaaagaaagaagggagggaggggcaggctgaaaggaagaaagaagaagggcatgaaggaaggagggaktccttttgtgtggtaaaggatttttggaacctctaaatgataatagtagtcccccagttctcagctatttcagagaactgtccagcttccccagcaatgatcatttgtcctgaccttttttgccaaggcaaaccaggtctagagtaaaatactacaaaatacattctctggtattaaaaaggaatggccaaaaccgtaattacttttgcaccaacctaatagtaagtttctgctttaccttatactttcttccttataatactgtagttgttgacataccaaggaaagtgtgtttgggataaagtggtcacataaatggcaaacatcaaagtaatgtcagattttgtagtgtttctaattgctgttcattttgtagtcactagaagacaacttacaaattgtgaaaaactagtcataaatcagagggagacaaggtttagtgagatccagttcacctccttcctggaacaactattggggggtatcatcttttatatattgaaacatattttatcttccaaatctttagtttacctttaatacaactcctcccagcccccccagaaagaatgctgtttgctctgattggcataggaccggctttgtcggtttcattacatcctggttgaattaccaaatggaaactgatttaggaatactgagtgtgtacggcacagagaaaaaatatcactgcgaaatttataggcctgtgtaagactgtcagggccctgtgttcaaataaagagagcaaaaggaaacctggcgaaaatcaccatctccatcccggcttcttccgacaattacaacttattcctgtgcttggctgctggtttggagcagctgcatccactcaggtaacacttcgcatcacctgggagctcattgttgccttacaattcgtgatcattttttgatctcactactgctaaaggataaaagtgctaagcataataatccataactgtatgagatacttgctacttcatttccctccaagaatcattttgctatgaaatatcccattactagtttcaggtaatgatctaagaattttttaaatgactatgtcagagctaggggcttcaggatagcattacaaggataatcatttcagagagttatatttttaaggccttttaaaaagagggttgtttctagtttttaacatatttgttaatcttattttgatgatctcataaaatcagagtctaaggaagagatgtgtctatgtgttgcttatgtcactgcttttttttattgtttacattttataaggagtgtctacatttgggggggagttggaatgttggttttgttgtttttagcaaaagccttggcatttgtcctgagagagctcatgcagtgtttgctgttcaggttgcatgaagggcaatctttagcaacctgtcagagatgcaaaggccactagggtctgcttgaggttcagagttcctctgcaggactgcgtggtgacagcacaccacaggtggcccattcagcactgtcatctgggacagcaaggataccctgctccatttgtcatcctatggaattctgtcagcagttgaaagcctttcagcacaaaacctttaacattcgaggcaaacttcctaattttttttttttttttttttttttttttgaracagagtttctctctgtcacccaggcttsagtgcggcagtgcaatctcggctcactgcaaccaccacctcccaggttcaagcgattctcctgcctcaacctcctgagtagttgggattacaggggcacgccaccatgcttagctaatttttgtatttttagtaragacggggtttcaccatgttggtcaggctggtcgcaaactcctgacctcatgatcctcccatctcggcctcccaaagtgctgggattacaggcgtgatccaccgtacccagcccatttcctgatatttttaaaggcaattgccgtggatgaaaatattaatacatagcacctaaataagtagttttttacatgaaaggatattatgttaagattatatgctgtgtgatatatagaaatgttgtatactccatgattttacagaccaaacaatgcaaatcatgtttcccctcttcttaatgaagatgttaaagtataactgataattgatggtaaaaatcacctgtctactcattctttcttattccttttgtttagtttgtttgctttgtaagcctggaaaagatgccttgaaatgtattttgaaaatagctttttgttggagtaataaaaaattagtccaattcttatttatccatagtaatgattccagaataacatgcacatccttaggaataaagttctcctttaaaaaaataaataaatagcatacatctttgaagtccccagatttccattgtcaagatttttctctyttatacatacccaaattaagagccttccctgcttgcccattaatatttgctattattcattgaatgccaatttttttttgccaattcctttatctagattatttataacctctacagaattctgtaagagtgccattacccctcttttcttaatgggaatattgagcatctgagtggttaaatgacttattcaaagccagtaggagacaagacttgaaccacatctgtctccaaatccaagttgttttgagtgtcttttgctgttattcgaaaaagccatgctgagatcaatgaaaggggtccaaaaacatgccttagacaggataataagaggtaagcaaggccatgagtaattcagaaatggaataatcagatattgagtattccagtcagatagaataaaaatcaagcaggggagaagacaaaattaggttatgtgtcacaacaaaatgtagactttcgaaggaaatgaacaggaaaggcagaagaaaatggaaaagtaatacatggcaggtcaaataaaagtaaacaaggtcatatgaaactcacatgcaaataataaagtagaaactagtaaggaagacagaaaggaattaaaaaggaattaaaaattcataagaatgttatcagtagacaagacaaaaaattgcctctaaagatggatttttttttttttcctaaaagagtatatagaatctgtactggcttgatatactggttttgcttttcatcctgaaaatatcattgataaacattgtgtatattagactatttttggttgggactgagtattgcccatggtgttcccaatgatatgagaagaaacatcctggtactaaatgccctggtggcctggggctgaragctttggctttgtataattcatgcacccactttcatgtaacatgaagtttgacaagtgaatattaagttcattatatgaaggtgttgcaaaccaaacttgaaacttatttctacctctcattctaaatggagatattttgtagtgctttagtctacatttacagtgatattagactctttccatttccttaaaagtatgatggcgtttggacattcaaccatgttcctctaagaaattagagtagaaaagaaatttagaagagaatggcttctaatctgcatgttgatatgtatctgactaataatctataatgttttcatttggaacaaataagccaacttgtgtttctttttcaatatatacatcatgtctaaaaaatgtaaagtcaataggcatgtaaaacatttcaaaaataaataattttatcaattgattgccattaaaaatagatgtctaaattgagctgcactgacatgactttataccattaccttgaaccttcctgagaaatgtattttgcttaatgacaatagagcttctcttttccaactacctggaagataaaatattggttaaaaaatgttgagcctcttttcctatttagttatagtaaaattagttaactctataattctctcttttataatttgattctatgtagtgagaccacaaacagcttaacttctctgctattgtttgtaaggtctgcaagtttagtgaaatctgtaccttatatgaactcttccttttaggataatttaagattaaaggctgcttagaagggggaaaaaaagtccatgttaacctttctcctttctctcctcttcagctacatctacatccaccactgggacaagccatcttgtaaaatgtgcggagaaggagaaaactttctgtgtgaatggaggggagtgcttcatggtgaaagacctttcaaacccctcgagatacttgtgcaagtaagaaaagaaatcctgtgtgtcgcttatgtctataactccttgtttcagatgattctatgtctcatgatgtattgttgctttttttccaattttgttgcatcatgttgaataatgctgttttatatgtagagtgttttaaaacattcacaccattcgtcatcactcctctgtcatatgcagaattgttttttgctcttttcaatgtgtgtgaggtgttttttgtttttgtttttgttttttgccatgttatttatagtgttgctttccttgtggtttttcttgttgttattcagaaaagatgtgcagatatcacagaggcctataacttttggtatctacttctacatccaatgtatgaattaagctgtaagataatgttgctttcttatcccagtgatcacctgccaaatgaataagacaacaaagagaagcagaagggcagaagattatttactgacatatatctattacacttgggattgtcttactgttgcataactattttttaaacggagtttagttttatattgctagtaaaaaaagagaaaaaagtaaattgcatatatttggaaatacattgtatgtagcatccctgtgggtgacagcagtgttctttcatttgtctatagatatatctagaatagcactgtctttccaatgacctgaaggagttgatgcaccattaagaagtatccaatttaggcctgggcacagtggctcacgcctgtaatcccagcactttgggaggccgaggcgggcagatcacgaggtcaggagattgagaccatcctggctaacacygtgaaaccccgtctctactaaaaatgcaaaaaaaaattagctgggcgtggtggcacacgcctgtagtcccagctactcgggaggctgaggcaggagaatggcgtgaacctgggaggtggagcttgcagtgagccgagattgcaccactgcactccagcctgggtgacagagcgagactccgtcccaaaaaataaaaaaaataataaaaataaagaagtatccaatttattctctctcaacaggcagcgtaagatagtgatagtatcagtacattaaatatttaaaccttgtagtaaaaactaataggactcattaaaaagtatgtttattttgccatgcattttaagtttactgttgatatttagtctacatatggtatatggacttaaaatttgatgtgggcataaaaatatatttaatattttattgaaatgatgaaaatacacctttgttttcctctttaccaacagctatatcccaaaagcaaggtattttaaaagtcgttccttaaaaaatgtaatgtagaacatctaataaattttgccagcagtccccagcgaaaacatgcagtggggacattattctaaagcagcaatgcttgttctaaaggagggaaaaccattttgtcacaaaaactgttttctgctagaatattggcgtgtgacttaaatcttgacaaggaagaacaagtctgttagagaggcaattgaactgataggagcaattagcaaaatgaaaaaggcaccagaaatagtcaacaaagccatgtcccttttacatcacagaaatactatataaatatttaggtgccaattctaataaaatcttaattatatttataagtaaggaagtgcatcttaaaaaacatatgttttaaagacaaaaaaagcaacgatcgaaaatgccattttgtaggccatgttttgctgctctctgarctgtggtagattgggcgtgtctgtagcgtgcctgatgggacctcatggctctgaacaagcaccttccagaacttctcctttgttgcactctaaagctcttctttgaaaaaagtagatacagtgccaagacaagtgttggtggttgtatagctgattttatcaaagacagacaatttgtaaaagtaaatgtaatctgttagagtgaataaaagacttagagccagaacagtaaaattctaatctcaattactaaacatctctttcacggaaataaataatttttataagccaaagtgaaatgataggtaaaagtcttgcaaaaaatattaaagcaagatgaaatacgagtatgaggccaggtgcatgcctgtaatctcaacactttaagaggccgaggcagacggatctcttgagcccaggagttggagaccaacctggacaatgtagcaaaacaccattgctacaaaaaatacagaaaaataattagccgggcatggtggcatgcacctgtagtcccaactattcgggaggctaaggtggggggatcacttgagcccggaaggttgagcctgcagtgagccaagatcatgccactgcagtccagcctgggtgacagagtaaggctgtcaaaataaataaataaatagaataaaaaattaaaaaaagagtatgtagaaaagatcattccttttagatctgaattatctcatacgactatgtttattgtttaaaaaataatcttagagattcacttcttggtcactaaaatattcaaatctatatgcttgcagcagaataaaaatctgtctgatttagtctttagttctgctgacttgctgtgaatacagcacaaatatgagacatccccatatttatcatagcaaattgggatgaaccaggtttttagtttgtaaggttttctctgatcaaaatagaaaatgccagaagctgagaattgtaatctataaaatatgaggttcatttgttatatggggaaaccttgttattttttcctaatcttaagcawacagtgtaattgtattttaataaatctccttgaaaaagcatttaaattataggtccttaaattcttctcctttttaaacagtgtacccatattatctatgtctcatatttttacttcttcagaaaagcatctgagaccactatattttaattatagtaatgaaatatgatcatttttcatcatcacttagcaaagatttacaagctgagtgagtgcatatgatagtttctgcatacctctaaggaaccagggcagttcttttccacatattaatttcagctattctttagccctcccacgtccaatacaaaacatgcaatcgsgtaagtgctgttcagttttttcattttaatattgtgccaacaactgcaatttttcttcactcaacacagtttctcattaaatcttaagcctaatccagtagtaaaaacgtgctatattttaaaaatcttgaagtgaaacatttgttactcttctgataattattaaagccccaagccatcctctgagctaattgtctagtggatcattcttgycttctagttctaagaaattacaccttttttttttttgtaattaggatcttttaggtaagttatttaaattattactggatcttatcagaaagaaaatctttgacatctatgattttgataacttccccctcctttgagatggtgactttattcacatattaaagcaagccaraaccttgagggaagaattggagagtatattttacatccaaaatacttcaaacctttctcgttacatgaaactgtttttatttttttaaatcctgtatgtaaaatatgtatagcattaaaaataatcactagtcagaatttaaacaaagacataatatactaggtcttatgataatacattgttcactagaccacttgaatagaaacagaagacataaaaatattgcattggctcatcatggtcctgtctatgaagccagttcatagtttccatatggtctatctgtctagagctaagcattgctgaagcatgagccacatcattgaaaatcagctttatccctgactaaagacatgactcagaaacaccacaagcatggaagtttccaagtagtctctctggtcacctaatctgctgttgtcttcttgggagttgaagtagaagatgttacagcaaatctcttttgtctctctgcttagaacaaggtgtttcgaatggattaaacatattaacagtgaaaaacttctctgaggagaggtttccggattgcttggacctcctcctggggactgtgtgggaatttcagtggtagttctcatcttttatattttgtttctctacagtaatttaaaatttattctgtggaaaaaatagttactattccagattataaaaagatgagaaaagaatcmttccwttttgtaccctctgatgctttatgtagtcctgtggttcaaagaaacaagacacatgaaatcaaacatgaaattgtccagatttcctcttgcatcttttctctattcttgtgtatctgttcttctgaacagtttcagtggagaactactttggaagatgttgatgtgattttttttaatctaaaaattattttatatcaggctgtgcttataagtccaacatgttgtccagtggacagatgtgccttcatctggaggggattagagttttaaactaccaattttggtgaacagtcttatgtcctttcacttcaactctctggacaatatatttatttataacatgaagttaatatgttctccaaatttcttcccagggagtcagtgaaattaaatgagttcatttctgctaaagtacttttaactctggggaagcaaaatttatttttccttataataaaaagtaaatggtagtattacattctctcagtagacattggaaaaatatatacacctgttttaacagactgtgttatcatgtttaatttctttttttttttttttttttttttgaratggagtttcatgctcttgttgcccaggctggagtgcaatggtgcagtctcagctcactgaaacctctgcctcccaggttcaagcgattctcctgcttcagcctcccaagtagctgggattacagacatgcaccaccatgcccagctgattttttgtatttagtagcgacagggtttcaccacgttggtcaggctggcctcaaactcctgacttcaggtgatccacctgccttggcctcccaaagtgctgggattacaggcatgagccaccatgcctggcccatgtttaatttctaattctttattttacttaagagtagcagttttatttggtttgttgggaccaccaactatctttataacttttctttgacagatcgtttaatatttctgatcattagtttccttataatgcaaaaacaacaaaaaacaaactaaatttggaaagatggaaggtatctgtaaacatagacttttataattttgtataatgaatgtttatgaagccatgtagggccttattatattatacattattataagagacaggtatgaaaaacataactatgggagacaaaatcacagcaaatataatactttaagtttgatagataaaatatttrtcaaacgtatttgataatatatataatgtaaatgaaatatttatcaaattatgcctgaggtcgcaatttttttaatttttgcaatcagaccttggcaatgaccttgagcagtagggtattaaaatcttccacaggcttagcgtcccaataatggaacactaagcataaatggattaacatttgtttatagaacagctatttgccaggcactttttaaaacacagagaaaatataaggaatggtgtctgatctctgggaactcagtctgttaaagaaaatgaaattgctaaaatagaaaatcaatgagtgaatatatgccaaatggtacaatgctgactattaaggtaatacaaatttaaagaagggaaagaaaagactgaaataagttagagaagactttttaaatataatcatcatttatagagtctttcctttataccaggaaggcattgtggttgtaggaattctttctctgagacacggtaacatgcagcttaattctaggaagtaaaacaaacaaatgaacaaaataaaagaactaagttaaacagtggagccacttaatgacctctgaaggtcaggcagaggactttgggtattgtaatagctaacagggagccatagtaacatctggagcagaagagtggcaccatagacatagcagatgtttagggaagcgagtcttccttacaggctagaagaagtctggggactaagtaagatggaaagagaaagtcaaagacatcaaaggcactagctaaggttaacattttataaaatactgacataatgatgctgatgatagtaacttttataatatgtattagtagctgaattaatataattaaacaagggggcaacggtacaaactcacagttgtgtcctgcagtctcatcatcatggctgcagaaagagaaatttggaaaaaataaacaggactgggttagaacttccagtctataagaacacacttttgttgtatttgtagtatttgttgtatttgtagtattgctgctaacaccaataccagcctagaagagttctttctttagaatcagtgttacacttgcctgtggtacttctctgttcttgaatattgtaacatttaacagatatagacagcatttgtgagagcaagtggtgggactcatgtggatctagatagtgcgctcttcagacgactgtgtcctctatttctttcatgtcctcatatatctagaatcctactatgtgcttatgaggaatttattaactcatttagacttttaactcactgaagtagggttgaagaaaattctttagtttttataggattcagtttaggtgtagttttacctaaaatcaggtgcattgtctaagtgttctgaatagcttcattcctcacttataaaaatcagttgagcagccatgtacatttattgaactcatatgagacaggctctgtgctcatgctacagacaaagtagtgaacaaaaccatactggtctttgcctgatggagtctgtaggctactgcaagtaacaatcatgtttcatgtaattaattgaattataaatcacaggtttgccaagtgctatgaaggatattaattgagctaagggaatgtacaatgaaagacctagtcagaggctgactctgctctgtggaaaaaagaataaaaaaagagtatgcagtcatactcttcagatgtatatagagtcaatttaaaatatttcattgtgtatatataccacattttcttaatccattcatctgttggtgaacacttaagttgattttataagttggctattgtgaatagtagatttttttataacttggctattgtgaatagtggattttataacttggctattgtgaatagtggatgaatattttagctagattgatttaattattcaacgttgtattcataaatcataacatcattttctaccccataaatgtatacaagtacaaattgtcaatttacaggaaaacgaatacacaattttgaaatatttatattgaatgatttaaggaaaaagtgaatatttagatgttttatcacagaatgaggctggtgaagtggataaggctataaagcccctcagaacccctaagctgtttgacgagacagggaaacttcctcaagagaggaaaaccaaaccacaaattagcagtcgatatgtcattgtgtcacaatgacgtggagatgtatgggatgtagattgatcccacatccaatgaaattgtttgacccccaacttaaggattcatcatgtagagtaaacatgggcaagggttttagtctttctgcagatgagcatttcagagcaagctgtgcaaacagagatttaggaagggcaccaaggttcaaacaagaagttaattcacaaacaccgccaccctcattattgggattatatgtcctggacattgaaaaacaacatttgaaaaggcaggacaagttaggtttggtttggttttgtttttttctcagcatttacccatgagtctagtgtggccactctatgtatcctcttatctcatggattggaaactagtccccagattgtcattaaaaaaaaaatggaggatatatactgtctgaacagtggtggtgagatataggttggatctgaaggaaacattactggaacattttatatttaatattttctttaatgatgttaaagaaggcattcccttggggaaataaatgtcttttgcagatgatgctagaaagaacgctaaaacacaaattagaaaagcatatgcaaacctcaagaaacttcacttaaaggtagataacagaatgaggttcatcttggaaaaatgcagactaatagtaacaatacctttgggaaagaataatctacaacacagatactcagccagtgagtgggcgagttctgggcagaatgctgagctggctaagaggtgagaaaagtcaatgtttgcaacacgatactgtaggaaaacagaccagcatagttggagctggcgtaracactgccacctcgagtttacacagagagagagcaaaggctttggtgtctgatactttctcaccaatattccttgatagagatttgttgatatttctatcatttaatatttgtaaacataggcatcaaataatttcaaataccacagctagtattgaggaaaagcagacagataatagggacttttcatttttcgacaaggtattttttaaattgtccaaatatttcactgtggaatgatgactagagagagaggaaatatcagctgtatttttttttcttcctcttgttcctratcaagggagggtttgatgaaaatgaagctgagaagagaaaggatgtctaaggatggtttataaattgaccataaatgtgtggtttataaaattagccaaccctaactagaagtttcttggggtccgtgaatatctataaaaacgtctagaatctccaccaagaaaaaatggaaaataatttattcaattggaatataaaaaatacaccaagcattaagtttatttcaaaatacatacatctatgattgattacatagtaagcatatcaggatattaacagtatattgaagttattattaaccacagtttttattatactggtgctgggcagaagtttggttagtagaatgcactgctttattgaatctgaagtaaactggtatttcactaatagtatttaaattcaagataacagacttacttttaaagaatcaaagaatcttttccaaattgcaaacatgatgttaaaggattttattggagggagggagactgtgagaaggatactgggaatttctgtaaaaattatttgagggcaggcacagcagctcatgcctgtaatcccagcactttgcgaggccaaggcgggtggatcacctgaggttcaggagtttgagaccagcctgaccaacatggcaaaaccccgtctctactgaaaatacaaaaattagctgggcatggtggtgcatgcctgtaatctcagctacttgggagactgaggcaggagaattgcttgaatctgggaggtagagattgcaatgagctgagatcttgccactgtactccagcctgggtgacagagcgagactccgtctcaaaaaataaaaaaaaaattatctgggagtccacagaggagagtgtatcataaactataaaaataacagacagatgttcaagattgacctgtgcttgcaaatcaattaactgtacgacaatcttcccttttttttttttttttttgagatggagtctcgttctgtcacccaggctggtatgaagtgttgtggtctctgctcactacaacctccgccttctgggttcaagcgattctcctgcctcagcctcccaagtagctgggattacaggcgcccaccaccacgcccaaccagtttttttatttttgatagagccattcaccatgttggccaggcttgtcctgaactcctggcctcaagtgatcagcccaccttggcttcccaaagtgctgggattacgggtcttagccaccacacctggcctgaaagtctcctttgatacaattgtggatcagatacggacgctgtggtctgatcttaagttcattttcacggacattttgtgagagcctattatgagccaggcattgtgctaggcattagagatacaaaatgatcagaatgtgatcattgtctgacagaatgtgatcagtgtgtcacagatcatcacaatacagataagtgcagtgaaagaggtcaggatagggtgcaatacaaaaggcaaggagagaattctccccagagcatagaagtgggtgatggggaggtggargacagggaaagagtgatgcctaagttcagaaaaaactgtgaattttcaccccattaataacaaatatagaacaaacatgatcatgttaagagcaaatactaaaatttttaaaaaccctgatttccatcttctaatctgattaatgaaacgaatggtatatacatacacacacacacacacacacacatatgtatatatatttaaagctacaacaagtacttgttattcagatccttagattgttctcagacataaaattcttggaatttgctcaaactcatgccaaagcttatttttcaaactcaggtttgatttactgttattcttatcttccaggaaagtgatggattgaatgtttaacatacaatgttgataatagaaatgtatcagaagccagtctccctagtctgttagaagtaattccacagaatttcacagagcttatagatcaactgggttttcatttgcatgtgctttctctacacaatcaatgcagtgtgcagtttgcatatgcagaaactatctcagtttctgcttttcccttccatctcatttggcaacaaatttagatgtctctgaaggctacatccttttgttgctgaacacttgagttgcttgggcacttgcagtttgttttacctcaacgattgtcttaaaaatccattttatcaagaaggatttttagaagtcattgagttctgtcgtccctgactggtaatgcattcagaagaaatgatgttggggttttctagcagtgattccatgtgttagaataagtatcatttcccagaaccttagtgggaaaagaggtctttgataatcacttaattacattccttcattttatcactgaggaaaatgagaccccgtaaagcaaaatagcgtgtccatgtgcaaacagcaagataccacagtgccgagagagggcgtttgcctcccttttcccagttcagggcaccttacgtcttgaactttaatctacatccacatctcttagggatcttgttaaaatgaagcttcttattccatagttctcggctgtggcctgcgtttacactagcacactcctaggaaatgctgatgctgtcagttctaagtaataacagggtcttataacactaagaaacaatgctgagaaaattcatctcccaaatgaagacaaacactagcaaaaggatagttctggttgagaggtagctgctatttccaaaaaatgactttcatacctcaagtagttctggtgttagtgcacccagttttccgtatgattttatgatagagataagccatcatcttatgctagcttcctaggaaacatcatgttagaaattcatagcagttagaaaattgattgggtaggatttctgactccctttacctagttgtcttgtgccttctgatcacagaactggttataagatgcctaatgacaatttccttataaatgccttccttctcttaaggaactcgtgattccttagctatttgttaatttaatgattcttactaacgtaagggcatttcctgccttgagcaattgtgtggtgtgtgtgtgtgtctctcttacacatacacagcgtgttcacatatcttatactatgttcttttgtaagaaacaaatggattatttgtgctcagtatgagaattttaacttttatcaagaattcaaagaagcaggatggaatgataattactgaatacatcattaattctggaaacacctgctttaattatagggtttgtctatatgaacttatagtcctggtagagaaacaaataaaaaccctatttacttcagaaataattttgtcaaataagttatatgaaaaaagttcccatgtgttttttcttatatacgttcagtaagaatgtgaagacattcttattgaagcatatgaaatggcgtctttttgagaaatgacccaacctctttttttttttttttttttttttgagacagagtcttgctcttgtctcccaggctggagtgcaatggcacgatctcagcttactgcaacctctgcctcccgggttcaagtgattctcctgcctcagcctcctgagtagctgggattacaggcgcccgccaccacacccagctatttttcatatttttagtagagacagggtttcgccatgttggccaggctggtctcaaacacctgaccttgttgtgatcttcccacctcagcctcccaaagtgctaggattacaggcatgagccactgcgcccggccaagcttatacttcttattgacatgtttctcaaggtagctcttcctctattccctgcagcaaaaatattctaaacaaaaataatccgtttacttatatgaaggtgtttccaagagtttgaaagagctgtgtcaatataagatgtttgttgtttaagcttaaacacatactcacagggcaaaaaatctgaaactgctagtattttatcgcgcaggctattttcataaagtaggagaattacatataccaagtcacttggtgaattggtttgaagggaaatgaaattacccctatattggtaacaaggaacagttttgttcatatctctttgatgccaaaaatatagtatgtattcttatttactctgtagtgaaaagggttgtgtaaaaatcactagggatgagctaccagagctaacttggataggctctttgcttgatggttgctgtatagatgaactattaataataattatgatgatggatgttgaggattcaaaatgatggtctttctatctgtaagtatattgcttcctagaacctttcagtggccctttttattagaggatatactggtaaaatcaatcctacttaaaatgctttagttattagagtaacagcaacagcaacaacaaaaaagtggtaattataaagagcttccatatttaagcacagccccattgcatgaccttaagaacaatattatatcaagattctagaattttgatagttaaatatatgtgagtgaataacatgaaaaatgttatacagttttaaaaatagtttttccttaaatgcaaaatgacatgtattaagtaattctgcataagaataactgatctaaattttaaaatgtatttgtctttgatttgggataatgcaattaagtgaaatttgtcttgataaaaatctgcttctagtatctttgaacattaaaaacaagagtttatttgtaatgtctttttaaaaaacagggaatgtagtttttcttgtcaataatcattatagtgtgaaagtacttgacttctattgtttaatgacttaacttgtaacataaaacacccatgaaataaatacacaattgaaataagtatataaaagaaaaagctcaagatcatttattgataagagacagggatggaatcatgttagcgcttatcaaaaccagtgtttcaacatagtgagaatcaatgatcagtggcaaatagggtcatgccaaagggaaattgacagctctccgggccatgctgcctcttattccacatttcaacttcactctagttaaatttcagttaaccaatcatttgaagactgaagcaaacaacaacaaaaatctgtaacccacagttttcgtgggacatggttttctaaatgtygtgtcttttcttttctttatattgcttggtaccagatcatttttaggaatctccatattccataggaggaaaattgccagtctgaaagctcagtgtctttagcattttttttttgcttaccacatttttgccctctaggtgccaacctggattcactggagcaagatgtactgagaatgtgcccatgaaagtccaaaaccaagaaagtatgtcaaaataatctgaaatttgctttctcccccaactacagcaacaatcactaccacttggtgcttttacagctcagtcgtaactgattcattttgttctaattatggcttaacctctcaaggcataaacccattcagtgttaccttatttaactgtctctcaaagtgggtccctaagtcatcaatttacaagaatggccagtcacgatggcccgtgatgctgacaaactattgcaggcaagccaaccgagaaacattttcttccaacgtgtgtgaccaaagccatcatatggaaaactgagatgaataaaacatcggatttcattttaaggggttccctttgaaagaaggcaaccacttaaagtgctgggatctttccaccataccaacttaagaactgcattctgtccaaatttttaaccatttgggggaagtgccagagcctgaaagccatgatcagggcaaagattcagttcctgagggtgaactcaccaagtttcagtcaaatgacactgaaggagcttctttctagcatatattcacctcttctctttttctctgtttttctaccattgtttttttgtttcttctctcaggtgcccaaatgagtttactggtgatcgctgccaaaactacgtaatggccagcttctacagtacgtccactccctttctgtctctgcctgaataggagcatgctcagttggtgctgctttcttgttgctgcatctcccctcagattccacctagagctagatgtgtcttaccagatctaatattgactgcctctgcctgtcgcatgagaacattaacaaaagcaattgtattacttcctctgttcgcgactagttggctctgagatactaataggtgtgtgaggctccggatgtttctggaattgatattgaatgatgtgatacaaattgatagtcaatatcaagcagtgaaatatgataataaaggcatttcaaagtctcacttttattgataaaataaaaatcattctactgaacagtccatcttctttatacaatgaccacatcctgaaaagggtgttgctaagctgtaaccgatatgcacttgaaatgatggtaagttaattttgattcagaatgtgttatttgtcacaaataaacataataaaaggagttcagatgtttttcttcattaaccaaacagtttgcattgaggcatttttttaaaaaagcatcaagtaggaaaattaaaaacaaacatttcacagcaaatgagatatcctggcttctgtttacgttgcttagggaacaagtaattcaggcactagtttaaacaattatttatttatgttaccatttctttatgttagtttcaaaagtaacttagaataaaatagttactgttatttgtttaaatatttattttgagatataacaactcaactataggataaatatgtgtttgtatatatatatgtgtgtgcgtgtatatacatatatatataaaacttaaggcaaaacatatatatatatatatatatatatatatatatatatataaaacttaataacttaaggcaaaactgggaagtttggatagatgttcgtggcttcctgaagttttgaacatcattcctaaaagacccaattcacattgtacataattatataaaccaaaccatgtatttgtcctattgtgaactggacacatataacttctgatcctggagctttcaaaatattgcatttaaaatgcatatcatgtagttatccttgtagatgaaagaatggcaatttttttctgtaaaggttcagagagcaaatattttaggatttgtggtgacaccatcactgtcacaacaactcaaacctactattgtagcatgaaaacagctgtaaacaatgcataaaactgatgtgcatgggtgtgttccattaaatctttatttacaaaagcagacagtgggctggatttgtcaaccactgatttagattgtcaattgctcaccccgaaaaatatgtcacatagcttactgcagtttaaattcacctaacataagaaacagtgatgtaagttggttatttaggggtcctaaaagaatcagatttacccttgttctgatgcatgcagagaataagtttctgtaattcctgttaacatagaagtttccagaataaattctataatgtataatgttaagattagacccgtaatgtgcaatcatttatttagggaggtagtatttatttatttacataggctacatatcaaagacaacttcgtaggccattttctgttgtgaaaaattagtaaattggcattgcaaaatttccaaacagccttcactttattcacaaacatttaagtaatatgcatttagtagggagaatttttctatccacagctaaagcaaatagcttgatttaatttttaagttaattttttaaagctaggatagaaaataaaaataaaagggaaaaatagaatgttatttaataccttaaagcatttctcttagaaatgtgtatttgtatttaaataacatagactcagcaaatccatgtggctagataaatgcagtaaaatcatattttagactttaatgacaattctgatcacttaattaagttacacttacatttttggtgttaagagttttactgtgctttgaaggcaatgttcaggcactatataaataaaagcattaaaaatgaagctatttcccagcataattatgtagttagatctgacagtagtaaccagagaaaatattttcaacttctcttttagaccatttgctttttcagaagatatcattttaaaataaccactatgtttttgtgaagttcagagtgtgattccttaaataacttctttagtatgctttcaatgccacttttggacgacatccaggaaagcagcattcatatttaacctgatttaacaaagattgattgcacatttatgaacaatatatgtaatggctgtgcaacagagatgcctcatgtctggaaaagcaagagcttccaatcagaaattgctttccagtgttgtcttaccgagagttttttcaatttttatctctgcaaacccctacatagaagtcagaaaaataaatttgtgctgctctaagaactttatgttcaagtagcagtgaaagccagaataaagatagagaatgtcaccatagtgaccgttttaaaatttaattgtttgtagtcttaaagtctggaaaacataaattttgaacacaaactaggaaaagatagtccccagcttcaaagagaaacattcaaaacttaccaaactgcattttcagttgaaaaataacattctaaagaatagataattttttaagtttattaacataaaacttacattattcagacttgatacagtgattctggtcagaatgtccaatgagccatttactgatttataaaaactgacttaaaatatgaaagagagggacaaatgtatattttataaggcagtcatttgccttgaaataaaacattatatttatagtactttctaggaaaatattgtcraggttagtcagcttcaaatttgacctaacttgacacagaattcctagttgaaaaaaattgtgttcatcsatatgtggtgtgtggggggtgtgtgtgtgttcrtgtgtgtgtccacacgtatgtgtgtgtatacaggcactccataatcaatgtacagattttagggaggaaaaaagaaaaagcacccacactttcaatagttaggggcagtacagagcaggtatgtcatatataaactaacataataggacctaattatagaatagctcaaatttagaatattttaaaagattgtaattttagaacttttaggaatattctcacactgagtaaatttagcagatatccttaaaagtagttttgaatcacaggttactagtgcatccatcatttgcatggatttctaaatgcaacctgttgaaattattcttgttcatcaaacatgtatcttgctaaaagtagaatagaggaacacttcacctgtgacaaaattgccataaattccagccaagtgttagtgagattttactgtgtgtgtgtttgtgagtgtgcttatgtgcacatggaatttgaaacttaaggagaaagtctccgttaacatttcaaagggcccagtgacactacggattggcatatgtgaaaaaaaacagtatctccattttataaaggtaagtctaaaattaaaagacagacactaaattggtcctgtttagaattggcattgacagaactcctttcgaaatctcagcggtacagaaagtcaagactttaagattttaagtctttgaaatgattagcataaacaggcccaagatgttaaagagaaaaatcctaaatgtcttcaaattttaacaggaaccacaattgcatggatatataatttttgtaaaagaaagttgttctattgttctttcctttaatgcaattgaaaatttaaattaacctacaggttaatcagttttcctcaagcaattataaaatcctaagacaaaggattcgtgagtcaatatttaatagtttctgaagacttttagatttaaattaattttttatattgctcagagcacagcaggaaatcacatgtagaaaaggaaactagattgtttacagtaaactttgtgtttttgaattattaatttaatttgaaaaatgtagtggctaggcagaagttcaataggaagcatgtgattcttaatgagtccaggccaacattagattaagtagaacagatagaaagtaataaccttttcataaaatgaaaagtgttcgtgtattctgctttttttttttttttttgacttacaatgaaagaaatgtagctaccaatagtaaaaatgaattagagcattatttgctctgggtctagtatgactgatgcatgttccctctgcttgtttccttgttagggcttatggccagaagagattccagttttaagtaccaatttcccattgaattatttgaaattggagctgcctgatatgaatgacttcccgtgaaatgaaattatagttaggctgacagacttacctataaaactgtaaatgcagtaatatgtatgcatgggcatgctactaattttattgaagacttaaccaagctttctatgcaactaatatagatcatgagcagtgttcatgtaggcatggagtcctgactctctggaaagagtttctgtagacatcgcttgattttaacccttaaattattactgactggtaggagaaaaaggcaagggaagggagggggctctagaaagaaaatctgggtcccaccttcatggaaatgagtaaggaaatttattattgacttccttggaaaatgaatgttttcacgtggatgttccaaagtttgtattaagaaagcaaatgggaaaaaaaatgaccaatttttgaccaattgagtgttgcacggaggcaagagaaatttatctggatttgaataaattattttgctgtgaatattgtgcaaccaagttaatcgtaactaaatcccctagcttttaatttatgaaaaatatagcttatttgcttgtgtacactggacccaaggcagaggaaattattatatatagtgcttcccattatccttgttatgcaatgtactttttgatatatgtgtttgtgtgcatatatgtgtgtgtgtatatatatatatatatatatatatactttaaaaaatctggggagctttatttccttaaagggcagcaagtttttaagttttcaagtatccccggagcttacagagtttttctgrctagttaacgagaatacagtaaatggcccagggtacatctcttgatgtgtytgctacccaagctgttaaacccttctgctgtttgccaacatatttcacgtctcctttactccccaggcatgcccagtgaggcatgtgtttgcataagaaatattttgttaatgaaaaattaacatgtccaaagtcactaaaaagttccacggcagaggcaggacccaaaaccaagatgattccagcacactcatctcctgctttttccctctctatatgaggtactttttccatgcccaaatgcaagtttttgtaagagaaacacccctccacagcattttcttcacacttaagagataccttgccatatcattgaatagcccttgtatctctcgaggcagtgatcaaagaaagaaaatatagatctccattgatatgctgtctctccttccaacctgcttcttgaccacacacataggcgcatgtacacgcgcgcgcgcgcacacacacacacacacacacagagagagagagagagagagagagagagagagagagagagagagagagataaaggaagtcctagagccttccgcatcatgaaatttgattatcagttttggttttgagaatgaaaagtgtcatccctggagattttttattttttttatttttttggggggcttgttttcccccacttcctcaatggagcctctgcaggttctgctgttcttgcaatcctggagtctctggagtcccagctgccaggattgctggctcttggctcatacctttgagtccacttccctgggcagccctgcaggtcctccaagtggctgtgtgcatgggagtccagcattctggagaagtgatttcactggctctctgtgatttaaaggagtaataagatgaaaaaccctaggaattggatctttcccacttatttttttccttacagtttgaaaaaagtgaggcgtagaattgtcctatgccatacagaacttatatgagaaaaactagaaggagtctccagtgtcccaagcccctgtttggggttttggggcagaagcatttgttgctttctgtgaatgaaacagacaagtgatgaggaaagtggaagattagaagaagtaaaagagatacagctaagaaaataattagataaccaatgagcaagaagtatttgaggccagctacccacaatcaaaaatccaagtccaacctgataacattttcagaccaaattaccatcctcttggcttctgctcctgcctctgccaatgggtgtctttgggtaaaaattaattaattaattaatttaattaaataaaattcacctccttggaactttgcttctgccttttaaaaaaaggaatgaaatagtatcaaatgccttttctgattataaagataatctttccattcccacacaaggaaataatttaggggatagttcagcgacagaacttctccctcagtaaggtcttttaagggttaataaagacacagtgtgctggtattttgcacacctcataaaaagagacgttccctatgtgaactcacagaggcgtacctgagcactgcttcttaaccacacaccatttgtctggttcaatgtgcatgcacagagagccataatagtcatgtgtaatgtgttttggagtgcagtgtattgctcttttctgaaactttttccctwtctttcttttttttgtcaactttctgcattggcagagcatcttgggattgaatttatgggtatggaccaatcatcattccttttagcctgcagaatttagagcctatgagctgaaatctttttcccttcctactcttacctttcagttcctaactaatttcctttttctttagaagggatcatacagctataacaatgatttctctgccttcaatctatgattagtttactgaaatgttactgagtgcagcaggttttagattcctaagcatccttcacttagagtttaaaagtaccctacctgctgcaaattcacatatatcccacgctgcttaacccactgattggatctagctctgctgttatataaaagctggggtaagtagtagtagcacataaaggatacaggggaaatccactcagagacctgagaacaaaggctttttaaatccatctgcttaaaaaacacacagcatcttagcctggtaggatttttggcatacaatgtaaaaatcatctatttaatataagcaatgtaatgtatatagaaagcccttacgttacaacacaatattaaatgcacagacttgaattactcagattttctggagatactcaagcaccaccctagtcaacttcattatcttataagaaggaaatagaaaacagaaagaaagcagccttgtgctattttaggtggagattccagtggtaatggaattaaatttgagtcatgaagattatccagacaagtaatcaaatagaaaatttcacactgtcaaagtaaaagaaaaatatatgagtatacaaaatttggacacacttttttgtaaggccttcatcctacatagttgggattgaagaccagtctctggggagtaaggagctgtgctaccttcccagagactccacagggccaggccagtcagtctttttcaatgctgcctgcagtcccggaccatggttgggtcagtgacacaatgtcctgattcacagaatatctggtccccatccagctggcttcagggacatcatgcagcaggggcatcctacagctgctgccttcttttggatgataacatcacaggctggacataatgtagtttccagactttgcgggaaatgaggcagttgcaagctctagcagctacagggattgctcaatgggttgcccatttcttcctcaaaaaaaaaaaaaaaaaaaatcaggagtaaactaccaatttgatgagaagcccccaggtgcacgtgaatgggcctttgtgcctcgcagaacatctccaaagagggagaaacacaagggggagcacctctattactagggagcacgttgtgtactgaggggagctatctattggagtttcttccctcagggaaaaaaaaaattgtcccacttatgaaatggattattggcctatcctgcagggagggaaaaaattctaccattaccccaaaccmttctatccttaacagcatatttctcatttttatagctggagggtctgactatagaatgtattgtttctgtccccaacagtaaagtgaaagacagttgagatatataacttccccctcagtaagatcttctatgggttagaaaagacacagggggctgctatccgcatgcttctcaaaggtacagtttccagaggctcatagttccaggcttgccggtgtactaaaccagaacattgcatccttcaggaaaatcagaccttaaaggtcaagtacaactcagaaaggtaagggctctgtttcttggccaggccagatcagactgaaaaatgtgcttgatctggaaacatgttagtccagccaaaccatgaagactctggggcatttgtgctcattgagagacagacccaccgatcggaatgacagactcttgtttttagccctgtctgtctctaatttgctcttccccagttgacctgacacataagaaaaaaattaatatggggaaaaaagaggttaaagaatccattgtttgtattatttttcaccaagtatttttccttgatcacattcatagtgtgggatcacctgattgagccaaaccatgaaaaattcaaatagcaatgaggataagggttgtagtgcatctggtcaatgctgatgtgaatataagattttaatcccacgtctgtattctatgggccttcgcttgaatcagctcattctagtgctgttacattaccctttggcctttactgagctacctctttatttccatgaaatgatcattttactggaaaatgtgtgtcttcctacactgcatagaaagaatgcacccgtcatcatgcaccatatgtttccaaacgcagctcaatctattcttctgtaattaacaacaaccaaaagacaacttgtcccaagaatccctgagagtatgcatgattcctttttcccatttagcccttgtccatgtccccatttttgaagtctgcagaagcagtttcctagcttctttctaaagataggatgttaagatgtcagtagacaagaataaccacagacttgcccatcttcaaagaagaaaacaatagaggacggaaaagaggacaatcatacagggccttcatctcttgtcaataatacctacactcctatttcttcaccaactcatcacagcccagggagctgtgctctgcatcctgggtcccagggagagaaggaccagtggggtgacagctttgcttcttagacatgtatcctaaaacctgatcaggataccaagatcaggaagagaggctacagcagcagcttcaaccagataacaccccatagaaattaattccctgtcctgtggctatgggggaggggargcagcagacatatgcaattaacatataagcactcacattccatgtcctcatctgacttttgctgcacacaaaatccgtgataccaactcaatatctcctggtacattgtttcaccgcaatgcaccagccgcttcgctttctaattgtggcttccacatgactgctagattaggagttatgctgtatggaatgacccttccaactttgcatccaccttttmttcccacccaagcatttcctccctctggttttcttttctttctttatttttcctcccttagtatcaggcatgctgtgccagggacttcagatggctccttaacttttaacctwgttttcccttcctcggtctctctgtcattctgtcagtctgtckgtcctcttggtttgtttttcctttccacctccaacccttttgatttgtttttgtatactctatgcagcattctagtcctttacccackgacttctcttttccttctcctcctgttaataatcagtgctatattaatttgatttgacaatgttcttgacctgtttactggaatttgattatcatgggctcggcttgtaggaaatgttttgtttcatgataaggtccactgtatcctagaaattaaaattcactttttcatttcaagaaaacttcctgcaagctgccctctctcaaaagagaaaaaggtgtagttaaaggtgtagttgtgccactgcagatataatatggaaatatgctttgaggttcccttgttgatgtccagaatagtcagctctgtttgtacagtattccccagttcttgaccaatttattgatcataatggcaagtgaacagcttacactgcttatttcataccagttgagttctctttctgagtgaacttgtgaagatcttccaataaatgtaattagactcactggaagctcaggtccttagggatcagagtccctattaaatcagcaaatcttgttaagaacctgacctaccttagtataatcaacttatcccccaaagaaactaactcgcaaatagaaaaacttctatgaattagagactgatcgcattttgggtgcagtagtatctttggttcaaagttctaagtgtcacatttccttagtataatctacattagctcatttgccaagttggccaacgtaggaatgtgcactctattccaaatcacacatcatttgtactggtgacttctttggacaaataaaacttgttcctaagtacaattggtggagtagttagaattgtcttccaaaggacaagtcaccatttgggcccataactgtcctacccatcacataggattttctttgatacagtgccctgctacctcatattgtattgcttcttgtgttcacattttactgttaaatcacagasagcctgactcaatttactagttaactacaagccaagttcatgtttgcaaatgtctttgaatttaatatatttaagttagaaatgactctttgtaaagaccactggatataaagtgatgatataaaatatctgggaaatacaaaaaggccaggggctgggggataaagaggggaggaaggaggaagtggggggcgcccagtgatgccaattccatctcctttaattggtgttgattcctgttgtctttgcaagagctttttatattttattttgcaagagactacaaaaaaaaataawactacagagttttaaccaaatagttattttataattaatgtttatgatttccaatttactatcaactatatatatctctatagcttataattagaagtaatttctgagtataatatttgtattgtaaatggccccagctggcttttttatatttatgttcaaagcatagtgcagagcatgttgtaccttagctatgtgtgtaaacgtaaagaattgtcatgtatttattttcttgtgaacatggacaatgtcatgcagcatgcccactgtttggttgtagtcagtcctggcaagtggaagtgacctgtgatgacatctgctctcatccctttccagaggcggaggagctgtaccagaagagagtgctgaccataaccggcatctgcatcgccctccttgtggtcggcatcatgtgtgtggtggcctactgcaaaaccaagtaaaccttctttctccatgcctttctctctccttcatgcaragacagcttagatggccagggctttgcagaatctgagctccacagcctagtcttggggataaaaaaaaaaggaggggcagggggagattatttcctctgaataatccattttgaggatgtctcctaaacacagaaatagaaagctgtttgcctattcatgtaaagatttctgttcaatgaccacagcccctgagtggataaaggcctggagggacaggcttgtatggaaggtatgtgtgtgggtgggacagaatgaaggcacctcattctaaaaggagagggagggtaccagaagtccatttgagggctttagtataattaagttatccccaaaagaaactaacttgcacctagaaaaacttctatgagttagagactgactgcattcagggtgcagtagtaccttcagttcaaaggactactgagaacaaatccaatttacactgaaaattacgagataaaggaaacctttcgtggtatctgaaatgcagttttctgagttatagtgattattattattatttttaaattctatctaattaggttgccagtatgaatgctctcacagcctgagatgtaaaaaaggaatctcaggggaggaaaatgaagcaaaactttctttgaaaacataagagagaaaacattagaatagatttgggttccctatgtttggtcttgaagtttggtccgtattaacaaattcaattactatgtgacatggattctcttcacttttctctcctacatataacttacatttcaagcctaatatgttaaattaacaaggtttttgaaaaaatgttgctgcacgatactctgttgccaaaccatccatgggaatatttcataatctgaatgttgcattgaggaagaaaaataatatgcttttatgccacaaaatccaaagcatggattgtattttgtcaatatcccatgatttagtgtgttgccagaattaagggatagagataagccttcctggagtcgacctggtgagtctcattagattccatctcaatattcgctgcctaattgcacaaaaagcgttaccagagtaggaacatgttacgattgtgccaaaatccgctggcaaaatatgtccacattctcacgcgtatacatgggatacactcacaaacatgctaactgtgtatattcaaaactcagttcattttcttaagagaccccaggaaaagctataaatgaaatcactcttataaattctacagcacattttttttttttagacagaatctggctctttcacccaggctagaatgcagtagcacaatctcagctcactgcaacctccccctccctggttcaagtgatgctcatgcctcagcctcccgagtagctgggacgacaggtgcacgccaccagcccggctaatttttgtattttttgtagagacaggacttctccatgttgcccaggctagtctcaaactcttggactcaattaattctcttgcctttgcctccgaaagtgctaagcttacaggaatgagccaccccacccagcccagcacaaattattatctaagacaaataagtgtccatttgtaagacttaggcaaagatggattgattaggaaatttgtgattttagtcaattatcaagttatttgtgttatcctatttttttcttgtctctcagtaaaacagctaaatttccataagaatcccaggtggcttttaaaatctgtttggtaaggatgtgtggtttcacttattctgggatacagtggacatactcccttccctcttcctcatcaccagtctactgccttgaactactcataggtgttggtagaataaagacttggctctactatgaaatgaaaataatcaaaaaaaaataaatgctccctttcttatgtccaggaaacagcggaaaaagctgcatgaccgtcttcggcagagccttcggtctgaacgaaacaatacgatgaacattgccaatgggcctcaccatcctaacccaccccccgagaatgtccagctggtgaatgtacgttgactctggccagtggaaaaaactgagcctctctcctttgttcagacgccttgaagtttattttcgaaagctcttaagcttttagctgctgccattaatcaccatggcttccaggaatccaggtttttgccaggagaaaataatgggaacatttttaaaagtggatttggttactgtaaaatcagcacatttcctcttataaagtgttcattaaggggttggaataatagtgttgggtttgttctgcaaggaggccatagctggggcttgcgtggagagagtggggagaaaacaaatttaatagtacgataatcaaaaagaatgttttcatatataacttggaaatacaggctactccattctgtaactgattagtacagataaccgagcaaagagctttagagttattttcttagggcaattcacagtgcctgatgatttactggttatgatttccaaaggattctgatttcctttagggcgtggaaaggtcaagtgacttatcaaacacccttctcagtagcaaaagaagagtgtcatgccagcttcttccctggccctttctaaatgatgtcaagccctccagatgaaatatatccataatcattaaaatatttttttcatactgtaccaaacactcagcattcagttttttaaatacaactagatcatagaatattaggttctggagagtttgaagatattatctttcaaatctctctttttctttttacagataagggccagagccgcaccatctcttggcttttggagtattgctctttatattccagcatcatccttcttattttcaaattattgctctgatgtatggtttttttaatacacaaagcttgaagcttatattgtagtaccattttctatcctatagaaaaaggcatattttgaatggaacagatatatcatagacccaactacagagttggtggttactaaactatcagcaagtcttgtagcaaaaaccttcaaaactttgttggagcaaggtgcttataggttaacacactctgttgccttttcaccctctaacagtgttcatcacaatgttctccacatttgataacgatattcactacaaaaggaactataatctgtcactctgcatgttataatatataaacggtagaatgactgcctagattacatttactgctcacattgtgcatctttgggctttaacttttctcaaccttatttcttcaatataaaaacagacctaaaaataatacctacttcagagactccttgtgagccttaaataaggtaatttgcataaaacacttagtctagtggcatttagtgagtgttcaataattgttaagtatttttttcattagattcactgagcttatgttgccttccaaaaagcaatagtgaaatggttcagggactggaagtaggtcactgtgtatcctttccttaaatcaagctagctgtacttcccaggaagatccacatggaatagcctttccactaagagaaccagctagagtttcaagcataattcaagctgtatatttttggatctccctgaatatatttagagcccgcagaccgtcagattataaagtgccttatttcatcaaagagtattcctttctattggttttcctattatttaactcaatttggtataaatactaacagcaattaaaacacaacttcaaaaaggggcctccctccctaatagaaacagtaaaaactactgtggtttgctgataaaaataaagtagactctgactaggcatggtggctcacacctgtaatgccagcactttgggaggcagaggtggacggatcacctgaggtcaggagtttaagaccagcctggccaacatggtgaaaccccatttttgctaaaaatacaaaaattagctgggcatggtggcatatgcctgtaatcccaactaatcgggagggtgaggcaggagaattgcttgaaccgggaggtggaggttgcagtgagctgagattgcaccaatgctttccagcctgggcaacagagtgagactccatctcaaaaaaaaaaaaaaaaaaaaaaaaggagaagaaaagaaaagaaagaaagaagagagaaaagtagaatctacctgcattaaatagaaatgtcctccatatattatgtgctttgtcaagatgtgtgcattgacaacaattgttaagtcccttatcagtagccttgttagccctaccactgctaacaagttaaacatttcagtgacattagtagggcaacatgggcactaggaaatggaaggagaaaggtaggcccaacatatagagattctgaatatttttttctagtgctttgaaatttgaaactatacaaatcacctgtctgcttctatttcaaatagcatttagccttcttcaccttgcaataccatgaaacaaatgaatgttggatggatatttgtatggaattctagtcattaatttaaaataaaatagaagaaataggacttttgctgataaaatgtagttgggatgatgggccgtacattggatgcacatccagagagtatttttttttttaactctattcatctaatctaaaagccacagtagccaggacaggattttccacctggccattggggaaatggaatttattacaaatcagctgtacaaaaatagatttgtgtgtttctgacagtgttaacgtttttatttacatgacaatattagtgctttgattgacatgaatctacgtgaatcttcaagttgtgtctctttgtttatccagcaatacgtatctaaaaacgtcatctccagtgagcatattgttgagagagaagcagagacatccttttccaccagtcactatacttccacagcccatcactccactactgtcacccagactcctagccacaggtatgagaatttaaaaattccacggcttttctctcagaatgaattgttgcacattgccttttgatatccctgcctaagaaaggaggcagtgaaatggatggtctttgggcagcaacagattttgaaaatcaactggctttgcccttaattcctgcataaatttgaacctcaattaggtaactccacagggccgttgtttcccattcctgagattgtctttactcatgccctgctactcaccgaattgctacactgggacaagtctgtctttggctctgcaaaatacttagaagtcaatttctttcagtaattggattgccctgggaaatgcacatgagaattggttaaatagtggaaccctaaattctcaaatgccctggtgatccccacctgagtgcacttactctaccaagaccaacactagatctccaaatgtagctcatacaaggaaatgtttctttaatctaagccactcaagaacagagagattataattatatactgaggagtggcattcgaaaatatttattgaatgagtgaacaagtgaatatactgtatccttacaaagccaatctgaatcaagatcctctctatagcaaattacctttgtggcgattctattcggagacaagtgatgttacagtgagctccgggtgcatcagtagtttgaaacatttgtcagaatccattcctttcatttccatttttttgcatataatttttgcacgaaatatctgattgtctctcccatttcctccgcagctggagcaacggacacactgaaagcatcctttccgaaagccactctgtaatcgtgatgtcatccgtagaaaacagtaggcacagcagcccaactgggggcccaagaggacgtcttaatggcacaggaggccctcgtgaatgtaacagcttcctcaggcatgccagagaaacccctgattcctaccgagactctcctcatagtgaaaggtaaaaccgaagggcaaagctactgcagaggagaaactcagtcagagaatccctgtgagcacctgcggtctcacctcaggaaatctactctaatcagaataaggggcggcagttacctgttctaggagtgctcctagttgatgaagtcatctctttgtttgacggaacttatttcttctgagcttctctcgtcgtcccagtgactgacaggcaacagactcttaaagagctgggatgctttgatgcggaaggtgcagcacatggagtttccagctctggccatgggctcagacccactcggggtctcagtgtcctcagttgtaacattagagagatggcatcaatgcttgataaggacccttctataattccaattgccagttatccaaactctgattcggtggtcgagctggcctcgtgttcttatctgctaaccctgtcttaccttccagcctcagttaagtcaaatcaagggctatgtcattgctgaatgtcatggggggcaactgcttgccctccaccctatagtatctattttatgaaattccaagaagggatgaataaataaatctcttggatgctgcgtctggcagtcttcacgggtggttttcaaagcagatactgccttcaagatggccctttattccagaatgttttggctttcctttggggagattgggttgggttgggggagttatagcaaaggtaaaatgaagaatggaggaaagtaaacaaagagatattaaatagtaatattgaattcatagattctctttctccattttcacctgagctggaagatgaccagtatttctagcccatcagtaagctgttacctgttcctatttgtttgcaagtctgctgggttttactttattttattgtcatctcaggctaatctttgaccatttactaaaaggtttacataatgtcaaatccatacttatgtggtagttacatgggaggagatgactttgatagagtctttccactcttggactgggaagttacttccaataaaataacacattctgggcttgaaggcctgttgcttacttttgcaagggcctttccttcaaaatgatattttagaactttgtggaatttatgaaatcagaggtaagctattacctgtttgtttgcaagtccgctgaattttattttattttattttattttattttattttattttattttattttattttattgtcatcttagtctaatccttgaccatttactaaaaggtttacataatgtcaaattcatacttgtgtggtagttccatgggtagggatgactttcatagactcttcccactcatggactggggagtacttacaataaaaaatgacaggctgggcacggtggctcacgcctctaatcccagcactttgggaggctgaggtgggtagatcacgaggtcaggagatcaagaccatcctggccaacatggtgaaaccccatctctactaaaaatacaaaaattagctgggtatggtggtgctgccctgtagtcccagctactagggaggctgaggcaggagaattgcttgaacccaggaggtggaggctgcagtgagctgagatggtgccactgtactccagcctaggcaacagagcaagactccgcctcaaaaaaaaaaaaaaaaaaaaaaacattctggacttgcaagcctgttggttacttcttcaagggcctttccccaaaaatgatattttagaacgttatggaatttatgaaatcagaggtttccctgcaaccaatctatgaaaaagtaggcagggtttaaactgttttaaaactttagtcttaaattcatatttttttaatgtattaaggaagtctatccattctgtttcaatcgttttttgaaacatgaaaaggaagttagagatgaaatcattcttcatcactacaagtgatatttatccttaaatgttgacatttccccactgtgctgggcttctagatgatatctaggactacgaaatattcctgaacctagagattatggagagaaaagatgaatcacttttatatgttggttgaatttaaattagcatttctcagagagcttaatttaagtacccccaaagccaaaagtttgaaggctcaaggcccacatatttcaatttctcaggcacgttcccagtttagaggcagctagctctcacgtctgtatcactgtgactccgggagaagcagggaggttcatacgttttccgttcctgttagcaagagttcagatgatggcattccatgtcatttcaggtcacgtcaaattagactctgtgaatgccagtgtgaagaaaagagtcatttagtgttgtgcgttggtaacattttttatcaaaagctgagaaatgtgactctgaataagccacgtcttcctcagtgccaaaagtcaggacttcttatactgggggaagaaagcatggtgtggtgaaaacagtgtgctcggtggcctaatggcaagagtcactgagcattatcagacataacatgatagaaggtaacagggtacagccaacccttgaggcatcatgaaagagattgaccaaagactgatatagctgtgggttttggaagagagatagaccaaagattggacataacctccattgtggtaactgtgaagccaaattaggttctctcaggcttacctttgactgtgtttgttggacactgggatggatagttccaaattgaatgttaactagttgcatttcatggaaaaaatgaaaagcacacaaatgtatgacactgttgtcaggaataaatctaagttactatgctctttttttttcataagacataaccttatagctgagctaaggagaaacaaggcacacagatccaaatgcatgcagatccagctatcagcaactcatcttagatcttcttccattccccatttgggcttcattctctaagaccccttggcctttaggaaggtatagtatttaagtaatacttctttcccttccgaatccctgagccttggtccttatataagctgagaggtttccaggacctaatgccttcttgtcttggctcatatgccattatttataattgtgatgagattgaaaatcccaaaagctttgatgagctaggcaatttagctgatctttgcatgcactcctgtgaggaaactcttggctacctaattttcgattccaagggtgtggaatttcctagcctaaataattaagcagcctacaatgaatagaaattctctgttctctgatgatataataccgtgaactctgtccccttaccttccctgctatgtgcctcttattgcaccacacttatgcagggtattctgtgctcacacaggtatgtgtcagccatgaccaccccggctcgtatgtcacctgtagatttccacacgccaagctcccccaaatcgcccccttcggaaatgtctccacccgtgtccagcatgacggtgtccatgccttccatggcggtcagccccttcatggaagaagagagacctctacttctcgtgacaccaccaaggctgcgggagaagaagtttgaccatcaccctcagcagttcagctccttccaccacaaccccgcgcatgacagtaacagcctccctgctagccccttgaggatagtggaggatgaggagtatgaaacgacccaagagtacgagccagcccaagagcctgttaagaaactcgccaatagccggcgggccaaaagaaccaagcccaatggccacattgctaacagattggaagtggacagcaacacaagctcccagagcagtaactcagagagtgaaacagaagatgaaagagtaggtgaagatacgcctttcctgggcatacagaaccccctggcagccagtcttgaggcaacacctgccttccgcctggctgacagcaggactaacccagcaggccgcttctcgacacaggaagaaatccaggccaggctgtctagtgtaattgctaaccaagaccctattgctgtataaaacctaaataaacacatagattcacctgtaaaactttattttatataataaagtattccaccttaaattaaacaatttattttattttagcagttctgcaaatagaaaacaggaaaaaaacttttataaattaaatatatgtatgtaaaaatgtgttatgtgccatatgtagcaattttttacagtatttcaaaacgagaaagatatcaatggtgcctttatgttatgttatgtcgagagcaagttttgtacagttacagtgattgcttttccacagtatttctgcaaaacctctcatagattcagtttttgctggcttcttgtgcattgcattatgatgttgactggatgtatgatttgcaagacttgcaactgtccctctgtttgcttgtagtagcacccgatcagtatgtcttgtaatggcacatccatccagatatgcctctcttgtgtatgaagttttctttgctttcagaatatgaaatgagttgtgtctactctgccagccaaaggtttgcctcattgggctctgagataatagtagatccaacagcatgctactattaaatacagcaagaaactgcattaagtaatgttaaatattaggaagaaagtaatactgtgatttaaaaaaaaactatattattaatcagaagacagcttgctcttactaaaaggagctctcatttactttatttgattttatttttcttgacaaaaagcaacagttttagggatagcttagaaaatgggttctggcttgctatcagggtaaatctaacaccttacaagaggactgagtgtcactttctctctgggggaatgatccagcagcttatctagttgacaatcaaaacacggctgataaaggtgcaatcatttctgacatgtatttttcactgattttgaagctagtgattggttgtgtcttcttggctcaaaaagaagcatattacggcacaaaaagcccagcccagacagcacatgcagcattttgtctgaaatacttctagagtcaaacgtgcctgctgtacatagcgatgacttgtcatcatagggaagtatttccatcgtagagtgttcagaaggagtgactgtataggtggagagaagcttagtgactccgttgaaattttaaaatgtggatgaccacccctttctcccccttatttttcttttatctttccatgttgccttgatcaggtcataactatgcatgaacattttttatcaggaatggccgatgtgtatgtgatttgtaatcacaagtaatgattcatcaggaaatgtcaatcctgttggaaagattgcacctttacttgcagaagtgacccccacctgtgtcctgacctctccatttacaggctctctcacccatttcccccacctcctttaatttttgctttactgtcataaagtaggactaagattggtctaagcactgcatgttcttttgtgatggtaaatccaaaggaaggcctataagtattaacatttgaaataactgctaattcaggaaaatggaagaaaaaaaattatttgaaacacagaacccatttcatggcctgcctgatatctgtgaaatcagggctggagctttacttaggattcacatggcctcctaggaaccatgggacaaatgggaaacaggttatcgggggattcatgaagtcagtgagagtaattgcttcttttttgcgggtgaactgaatgtatttcttcaccaaatcttgatgttaacaattaaaaagaagaaatgacatgcaagtaggtcttagcagaaaaatgcaggctgggcatgagtcatgttgttaccctcccacatgctcctacaatccacagagatgcctgtctgcaggttcttgaagttattgttagtatttggtatctcaaatttttcgtcactgttcacatgccactttctctgtgcacagtggtatcctcatttgctttttaacctacactgaggagtctttgtcaggttgcactgattttccaattctgcagtaatgagtaagctcacggcatggggaagaagacagtcagtccaatgaagttctctaaattattttaacattgcctttgaaggccttgactcatccttagctatttcaatgaagaaattcctaccatgaatttaaaaccctaaaaattctgtttcaaattctttgggcattggggtactcagatatcccattgtggaagaattttaagaataaatagaagtttctgttgagaaccatgagcaacatgtttcttacaatgagaattgctatgcattttaaaattgcaaatatatatgaaaattgaagacaagaggaaattgtatttctaacttgattctgatcactcacagaggtggcatattattatagttgggacatcctttgcacccttcataaaaaaggccagctgactgctcagcatcacctgccaaggccactagatttgtgtttacaggggtatctctgtgatgcttgtcacatcactcttgaccacctctgttaataaattccgacagtgcagtggcgatcggagtgtgaacttatgttcccagcatatggaaagctatcttaggttttaaggtagtagaaattgcccaggagtttgacagcaactttgtttcccgggtctaaaatcgtatcccactgaggtgtatgcagtggagcataatacatgcaaatacatgcaaaactccttttgtttcacctaagattcactttctatcttactttcccttcctgcctagtgtgacttttgcccccaagagtgcctggacagcattctagtttctacaaaatggtcctctgtgtaggtgaatgtgtcccaaacctgctatcactttcttgtttcagtgtgactgtcttgttagaggtgaagtttatccagggtaacttgctcactaactattcctttttatggcctggggttaaagggagcatggctcacactggtgaaaataaggaaggcctggtcttatcttgtattaataatactggctgcattccaccagccagagatttctatctgcgaagacctatgaaacactgaagagaaatgtaggcagaaggaaatggccacatatcacaagttctattatatattcttttgtaaatacatattgtatattacttggatgttttcttatatcatttactgtctttttgagttaatgtcagtttttactctctcaacttactatgtaacattgtaaataacataatgtcctttattatttatatttaagcatctaacatatagagttgttttcatataagtttaagataaatgtcaaaaatatatgttcttttgtttttctttgctttaaaattatgtatcttttccttttcttttttttaagaataatttattgttcaggagaaagaatgtatatgtaactgaaactatctgaagaatgcacattgaaggccgtgaggtactgataaactaaagaatttattattcaaaatactaagcaataagtaattgtgatttatttaaagttttgtccattttccatgaaagacatactgcaataaaaatgctactctgtggagacctgggagtgttgctcagcagactacagcttcagtctgttagaccagcacctttcatctcattcccatagttatgctaatttaggattgtgttccatggaccccatgatcaccttgtctatacgttgcttcttgtctgtccattgcttttgccacaccacctgttctcaaatcatctcctccctaccaatgctgtttatcactttcttccttgttgaagaggccacacaaccagacagtactatgcttcctttttcctccatacacaataacagagagagaatattctagggcatgactgcctggatcctggctgttgctatcttttgtagtggcagtaagaaactccttcagactaatgaaaatgtcaacgtgccattcaatcacgaaaggtaacgaaaaatgctctcatggttcaaatagtccaatggcccatagtggcctaaaaggcagccagttgacacctggccatgctaagcttccttataccatccgctaatgactttccattgggcccacaatttacggattcataattttaaaagaggagaaggccaagttaggttcattccccttattctgtcaataaaacaaatcaaactcatgtctatctaactgctcagggaggagcctttgcatgagaaaattctcatattctaagactgagtcatagaaatgagggtattacttttcttactgcaattaacctaaacaaaagccatattttaacaaatagatatttgcatggtacccttcatatattccaagcatttcactcattattccaggtaggttaagagcttctgaagtgtatgaagtaaaggtcagcaatcctttggggtgaacagtggcctcctttggagtttgggggtaacctgagacttcccaccaatgtccacctccatctgtgtacctaattcctattacctagttatggctcctctaggatcatttccaaacactctggatgtccaggaaatttaaattgtagcttttgactgagctagtttttcctatttatattaataaattttcaaaaatgcttgaaatcttcacatttgcaacaactttagttttcatgcacatacaaacacagagagacaaaaattccaaacagacactctccaaaagccaccacactctttcacttgctctatagtcatttagccaaccagccatgcagagaatatttaaaacttaaagattgagacattattctcagtttttgctgaggctttgtaacgaaattgaacactataagcagctattgtagtaattttggttaaaattgtttgcctgggatatagtatttgaggcagaagcacgtgtgtgaaggaggtgaggtggtttggaaagagtgaagactcgcagccagattgaatgtctggataattactataattctcccttcttggttgaaaccatgttctctcttgatttttaaacccaggctgcctctggaaacaagcaaacctgagtctttctaacctgagtcttcccaatcattagatttcttttctgtcctaacgatgaatgataaaaggacttgatgttcacaatttggggttataaggcaggtctgaaatctggagactcaagatgctggaaggagtggaaagtttcgatgactttatatgaatcactttgcactctatgtttggcttgtcctctttgaaactgatttactaaaataaatgtaagggaactattactccaaaagattaacttggcaggaaataccaatactttcagtttatgaaagacaaaactgtcttgttgctacaggaagctgcaatattcctaacctttaaggttggtgttgaatagggtggtcatgccctcccctgcaggtatctttaggctcctgttgacctcctggtactataactgttcgtcttctctgggtagctattgattttgaactttaacatgcttcaaaactttattcatcagggaaataggaaaagagttttgttacctggaggaaatctattgtgatctacctgagctttttaaaaacagaccaggagaaggaaaccagtaatttttaaagaagagacagagaatgggataatagtttcacccaggatctctttctaaccctttcccttcaaatgaacttattggaacagaattggaaagaagaaaggacatctctgcccaccccacaggatgccaaaaaggctaaagaattacctctgtagatttaaacatctttaatggcttatgtatagatttgctaatacagagagaaatgaactattaaataaaaatcacattttataatatttttatggcttaaaacatcctttatctcctttttgttctctctacatgatatggtaagtgatgaggaaaatttaggctcaggaaggttaaaatctttcttggagttacacatctaagagagctgcagagctgacacttgtacccaggttttctgactgcaaatccagtttctttctattgcgttcttcccctttccctgcctcaagcagaaacaggttttttattttcaacctttgtgtatacagtatgttatgttacatctacagctaagtttctttttagaagaatgtgagcccttctagctttggtttagagtgattctagaagccaatttccttggcttagtgattctatgcacctttcctaaacttagctttctaaggaaatgaagtgtacgagtgagaatgaattcacaatttcgacatgtaggtagcatcctaaagtgaaaagaggaggaaatttgtggtcaaagcactctccccaccacttagaaacttactgactgtgggcagcttcctcctccaagtttccttcctgatttacaagaccgtggtgtggtcaggattaaacttgaatacatgtaaggaagcctgaaagtgtctaacacatagcgagtattcaaatgccaccttctatttgatccttcccctccagttccttaagttttggaatctaggtttctcagttccaaatggattgacatttgcatatccccattgcacaatggatcaaataaactttatgttatcatttctccaacatagtgccagtaagcaaatcctttttaataacaacagtatgttgagaaacatatcaccaaataatatttaactttgtagctttgataagttctttaggttttggttttggttttgttttctgagacagggtcttgatctgtcacccagactggagtgcaatggttcaattttagctcactgcaacctgtaactcctgagctcaagtgatcctcccacctcagcctctcaagtagctgggactacaggtgtgctccaccatgcccagcgatttttttttttttttttttttggtagggacaaggtctcgctatgttgcccaggctggtcttcaattcctggccttaagtgatcctcctgcctcggcctcccaaagtgctggaattacaggcatgagccaccacccataactttatgtttgtttttttgatgcagtataagttcagcttgcttcttatgcagccataccatttcatgttaactctgatttttagcagcttattacattagtgttttattattaatataattttacagaaatttactaaaccatgactctgtagagttttaataatactacctccaaacatcattgcaaacatctagaagaatgaacaaaaatgatcttagatcgacagtatatctgtttgtcttagtttctacacacgatgttcagacatattccatttctttaaaaaaaaaaaaaaaaaaatatatatatatatatatatataggcctggcacggtggctcatgactgtaatcccagcactttgggaggcttaggcaggcaaatcacctgaggtcaggactttgagactggcctgaccaacatggtgaaacctcgtctctattaaaattacaaaaattagccgggcgtggtggcacatgcctgtaatcccagctactcgggaggctgaggcaggagaatcacttgaacctgggaggcagaggttgcagtgagttgagatcacgccattgcactccagccttggtgacaagagtgaaactccgtctcaaaaaaaaaaaaaaaaatatatatatatatatataaaatcccaccaaaagtctgcagagtgaccaaattagagggctctggtttcagattaaattctaaatgtgagaaaccacatagctcccatgatccatccaataattcctcacgtcctcttcactctttactccatgcataaaacagaatttttttttctcatcctgggtatgaagcaattaataatttacggatttagcctatttggattcaatcccttcaaactccatactacatccaaggtggaagtgacttaaactctgatatcaatcatcaggcttgtaatataggctttgttaatggcaggagagtctaataaaactttctgttccttatccttcatttaaatgaaaaactttttattgaaaacaatcataactctagctcatcataaatataattcatgaggacattttattatttttatattaaagaaataatattatagatgtaaactttgcacctttctaattattatcatgagttaagctaatacttgtcttctggtccctagatgatgattcttttttgccttactggaggagcccttgtcttgaagtgagttgcttcaacagcagaggacttctagtttctcccagttgagcctaaagtgaacttttcatcttcttcagaggaaggggcttccttgatttgtacttttgtggctcctcagataacacagacaattttatcttggatcccaggttctcttcaccattaagaataagaaagagagaaaatgctgtgcatgacagccacctactccaaactacccaaccccctgtaaccaggtaccttccaacaacgagatgattctgccctcactcaagagtctcccccacaaagattccattctccctttactttttattttttatttttttgcaaaacaaaggcctcctttagtacctccttagtttataacccttatcttcccagctcttcccttcactgatacctctgatttcaaaagttctgaagtcggaagaccacacaatttcagactgtgaacagaaattcagtcagaaattattggagttagaaagaatttagagaaattgtattgaactagaaagtcctctttgattagtggtggccctttagaaagttctagggcagagtcccatggtgtttcatcttttccatgatttgcttgaccaaaaacttctctttcacaacatgaaaatatgctaatccaccacacattttggattctgctctgtttgcctgaggtgttagatctctagccaggactgtgaagggaaggaacttgaatccttcctattgagctattaatgcagagtcagtgagatgaagggttccactcggggtcaaaatcatgtcagttaccaagcaaaggagcaagtaaggggaaacatctcctcatctggttagtggagccacatttcacccactgatcaagccagacctgagcaatagtctagatttctccctccacatctaattggtgacaatggtgattgtaccactgacaggtcacacaagtccacaccctccttcacagcctcactgcttcggctcttgtttatgctcttatcagcatctgtcactgggatccatttctctcctgactcatctacttcctttcactcccctgggccatccttcacatcatgctagaagactgtgtctaacttgcagaacttattgtgtcaatctcctggttacggcccctccatggctccccacctgacataggagacccttcacaatctggcttctgtcactcataacttgtctccagccttcattcttcagtctgattttatggttttctagttccccaatacaccacaccagtgtttatgaaaccctagtcattggcctacgaactttatgattattgacatattcatgtaccacctgtattattttttgcatagtgtttatttttaattgactacatttttaactacaataaagtaatttcaactaaaacttggtatcaatgctgcgaatggaaaactgctatcagttgccataataaaaatgaaactgtaaaaataaatataataaaaatgaaacaaagttattaagttctaaccagatactgttgcctgctcaaaggtctgagcaataagcctgttctctgtttgacacaaagggagttcagaaagtgttagagagatagaaaatattttggggaagcacagaaagatttattccctgagttagccaggattgagagggagttgatagagcagttacttctatggttttgttcaatgttatttaatgcttgatcctagaatcatcctgcatacaacattcagtcatccacatatctcaggaagcacaatattgtgcttgctacatatccctgcccttgttctgttttactggaactcccttctccattcgtcctcctgacaaacttctttcgccctctctctggataaagagagtttccttctctgggattccttccatgacctatttccaagtttccaggccttgagtgttccttcattgctatctcatagcacgccatacactctccaacacagcattttccatctatctcagaacttgtagttaactgcaactcctccctcagcagaccatccgttcattgaggacagacaaagacactgtcttatttgtgtatgcccactgcctaagacagtgcctggaacgttgtagacactggacatctacagaatgtatccctggcagcgagagactcagttgccataggttggcaagcacatgaggaatctaggggatcatagtgacctttaaagctaagatcaagaaaagagtaacctgtaaattgttacaacaaaatcagaaatgtaggagtagaaccaagcttgctaagtcatggtcaaaaacactataggtcagagttcaaggaatggaggcttcaaagtttagactagattttgcagtgaatgcatgagtactaaatatacctttacgcttgtcttggctccctctccacccaggaacccaagattaaaattaacccttcatttctcttcttcctccttccatcccctctcgcatcttctcaaggtctcaaaaataaagccctctagttgagcattcttcactaggtcaggttgtttttttttctcaacttttattttagattcagaggatacatgtgcaggtttgtttacatgggtacattgtgtgatgctgaggtttgggctacgaatgatgccattcactaggtagcgaacataatacccaacagacagtttttcaaccctttcaccccctagtagtccccagggcctattgttcccatctttatgtccatgagtacccaatgtttagctcccacttataagtgagaacatgcagtatttggctttctgttcctgcattaaagcccttaggataacggcctccagctacatccatgttgcttcaaaggacatgattttgttctttttttaatagctgtgtagtattccatggtatatatgtaccacatttaggtcagccttataaagaagatttccttattgaccgtagcatcaaacccaacctaagtgctcagtcctttgaagaggtacaaagatatccttgcatagaacaagcccacaagttttccagatgtgtgggttgagtaaaacatatgaaatgaacatgccgtataaatcagtgaaatatgtaatttgttattctggatagaatgctgatttgcaagactaagtgttcagggatattttctaggtaattccacttcatacgtaggcacagtataactatttgcaagggagaggaagggcacctaatattaccacagaagtcttcttttcccaatagtttgccagcctgaaaatgtagtcttctttattgattaaaaaaatctgtcaaattgtcaacttaaatgtaaggctttttgtttattggtttacctagtgattctaaagctaactccaaatttagttacccaaagattaaaagaatatagccgtgtggtttttttaagctttcctgtccaatatacaaacccagtttgccacctgctcatcaatggaattttatgtaactttcaactttaaagataattggataggaaatacctacagagctttttgaaaatttcagtgaaacggcatgtccctggcatggagttgatcacacctgcaatccctgccaatctgtgcttgtcagactcagaattagtctcctaggctgcctattcagtgatgcctgaaggtgcccacacctgggatagcagataccacactgctcgtgaccttctaaattccccacctaaagggcagcaggttgacaaccaggttgatagggttaagttttgtgttgccacccaaatctcatcttgaattataatccccaggtgttgagggaaagacctggagggaagtgattggattatgggggtgggggcagtttcccccaggctgttctcatggtagtgagtgatttctcacgaaatctgatggttttataaggggctctcctcccttcactcctcactctgctctcctcccaccttgtggagtaggctgtgtttacttccccttctaccgtgattgtatgttccccgacacctccccagccatgtggaatggtgagccaattagacctctttcctttataaattacccagtctccagtagttctttggattagtgtgagaatggattaatacagtgaattggtaccgcagagagtggggtactgctataaagaagatacttgaaaaggtgtaagcaacttcagaacggggtaacgggcagaggttggaacggtttggagaactcagaagaagacatgtgggagagcttagaacttcctagcgacttgtagaatggttttggcgaaaatgatgatagtgatatgtgcccggcaaggtgtcatagccccagcactgggaagtggttgacacgcgggttggtagaaagaatttaccaacaacagtataggattgaaaaaggaaagtttattagaaaggaagaatgctacaaaagggtgcagcggagcacctcagtgggaggactgagtgtaccacggtggattttttctgaggagcatttatggaccttaaggtagaagcttagggttatgaaatgagttttggcatggcattccagagatgcagagaaattttaattattatactcatccaagttgaaagaggcctggaaccagatgctgactttagatactagggaagtttaattacttcttacttttctagataaggagttttgcctctggatggtctgtttaatagttaccaggtggtatttgctcccttctaaattcctcagacaaggagtttttttctctggggcttgttcaatagtctccaggtgattttgctctcctcattttccctctgacaaatattttggtcaaatctttgaccctttatattcccccatgcctcatgtctacctgctgcctattggggtctcaagaaagggaaaacaccatagtgaagaggggcatcgagtctgtctggctacttgctgctgaaaggggagcactgaaggagataggttgtgtttttccctttcttgttctctgtcacgaaagcaattaagggtcatgaaaaactcgttcaagggtgggggatggggagaaactagattccatcaagaggccccacataaatggaagttactgttgtaggctggtattgggattgcatagtcacctgtaggtggaatctctgtaatctggaagatacaaacttagtaaaagcagtaaaaagtaaggaccaaatatcaaaagaatgacaaggaacaaaggtccaaggaatggaagaagccaagtgatttttggaaaccaatcagtaacaggtttgatccactcttggttactttgataaagtgtatgtaaccatctggcttgtttgaaaatgtcttgaacatcagtctccacttctccagacacattaatgtaggtgcaacaggttttgttgatgacagcacagtctcctcctcattcagctaggaggaaacacagagcttgtctattatcaaaaaccattcctgctagtgagtctaaagacttttgtatcgctgatatacttgcaccaatttttgctaaggctatttcaagggagatggtaagttctagtagtatgattttatggtaagtaaaacctgcccgaggagcaagagttgcaatagtttctacaactctggccacaatatgttctaggcccctttgtcctcttgaatgaaattctgagttggaagttatgttcaggacagcgatttaggtgggagctattgttcctagagtacaatcaccataatgaagagaatgatcaaggtgggtaatattgttagcctttgtgtccccacccacatctcatcttgaattgtaatccctgggcgtttagggagagaagacctggtgagaagtgattggattgtgggaacggttttccccatgctgttctcatgataatgagtgagttttcatgagctctgatggttttataaggggctcttccacttttgcttgccacctgccgcttcgtgaacaaggtgccttactttaccttacaccatgattgtaagtttcctgaggcctccccagacatggaaaactgagtcaaattaaacctttttcctttataaattatccagtctctgatagttctttatagcagtgtgagaacgagccaatacacaggtattgaaatatgaacaacccaggggcttgtacatggttaaatctataaagccggaacatctgtgctccaaagccaggtcagtgctttatttatcttataaactcacagtccaaaagattcatagagagatcctgcctctacaaaaaatttaaaaattagccagtcatggtggtgtgatggattcctcttggtggaatctagtgatgggcctgtggtccaagctactcaggaggatgaagtgggagggtcacttgagcctaggaggtagaagctgcaacgaaccatgatcacatcactgcactccaacctgggcaacagagtgaaaccctgcctcaaaaaacaaacaaaagattcagaataaaccacttagattagtataactcttttctttgaattcacaaattgaggatgtaaaatgatcttgtccacaattactcagccaataaaatgaagacctgaagaggagctgacagctcctcagctattattaggccatgtggctagtcatctttaaagcccctgaagaaaatccagagagtagtaacttcctgctctttcttgctgatactcatgtgtcagcattccatgttggaagctgacaaacattgtgcagctttctctagaatttgcctatgttatggtaaaaggaaaatatggtataaagaacacgagctctgagaccagtgagatctaggcttacatccttcctctttcacttggacaatttgggcaaatttacatccttgagcttcagattcactgtagggtttacatttgatcatttttttatgcaagctttagtacagaatgccatatagtaggtgctcaataaatactatgtcctcctttggggcaattttcttgtgtaggaacactagcttgtctggcaaagagaaagggataggcactgttcctgagcttagcagcctcactgattatggctggtcctgcccttcaagctcccctggggaagccaggcaagaatgtgtgtcatcaggaagctggggtccaggctctgctgccaggatggaggcccattttattccccctgctacctcaaaacataagagtacaaacttactcagaaccgagttagcccagtagaacagatgtttcattttccttgagaacaaaacaattttatgaattcagaaatggaaataatagtttgcttcatctaattagcaggagctaatttagatttcaaggtcattgtgtacggtgtcctcctccttcacatgcccagcactttggctctactccctccctgcttctgtgattcagcatccatgcacacaccataaacaatcacaatttccattttaggatttggtctcctggtgctgtgctacagcccccgtttttaggaaattggtgcttggcaaacgatgaaaagtttcacagaatatgaaggttatggcacagttttctcctgcctcatggcttaatttaattaagtattctgtaatagctctgcagcagacttgtgctgcggaatgggctccaatttgccctatggcaactgcaggagcagagcaactataagatatgcaagatgactcatcagctgttggaaaatgcagtgaaacctttgccttttcaacaggatcaggcaaggggactgagacagcatccctgggaatagacacctggtaactcagcatctacaagatcattttaaaacatgcttacagtagagtaatcagcaaaaccactgtctgaccttgaaattattctatggctgctggaccttgaagacactgatggaagcagctaagtccagctgtctggaactttgatcaactatgtctgcccccctcagtgtagccaagacctcccttacagcaggttctctagggcaggaggtgtaagcagagaagtcaggagaccaagatgctctttcttattgtggcagataccgagtaacctcatgcctttgcaggctttcggctgtgagcaaattctgatatttattatccttactggggacactcagcttcacagattttgtttttcaaacatgaaaaaagaaaaaatcgaggccctgaagtcacagaatgttttggcagctatgttcaggcttgatagaaaggcatccccatggggacgtagcttttgtctggttccgtttaatttgctatcttcagaagggaaagatggagagataaccggttgggtggggctatgtgatggagattttctgttaagatggaaatgaggggagctttaggtaagtgacagatgacttcccaagaaactgcatgtaactagtcatgaacaacgttgcaatctaagacacaagtgacagaggtggcctaggaggcaatgctcacatgtagtcagtttgtacagccatattcccttgcaaggttgtaaaggggaccactctgtattactgctcatagccatggctacgctgtctgcctattagatgtttaagattttttttttttttttttttttttttttttttgagacggagtctcgctctgtcatccaggctggagtacagtggcaccatctcggctcactgcaagctctgcctcccggattcacgacattctcctgcctcagcctcccaagtagctgggactacaggcgcccgccaccatgcccggctaatttttttgtatttttagtagagacggggtttcaccgtgttatccaggatggtctcgatctcctgacctcgtgatccgcccgcctcagcctcccaaagtgctgggattacaggcttgagccaccgcacccggccaagatgtttaagaattaatctccagcatttcctgcagcccttccaaaattgatcctccaagaagattcatgcaaacctcattcatttactcaaagctcattctttcattcaacaaacttacactgagtatgtgtgataggcacaacactgggctaagagtcggggatgcaaagagtaaaatgtaaaatgtatcttatttaaactcatctaatccttctaagagaatacattctagtgctggagattgacacataaactacagcaatgtgttctggatactgacacataaactacagctgaggaggttgtgcttccgtgaaaagaacataagatttagaatccttagtcctatgtttattaccaacttcacccataggtgcatgtaaacctaaccttgacatattactaaacatcttggagcctagtttatctacctataagagttgaacaatcttaaaaggatattgtgatggttaggatatataaatatatatatcagtgtatatatataatgatcatatcttatatatatcacatataaataggattatgaaggttatggcacagttttctcctggcttaaggcttactttaattagatattctgtaatagctcagcagcagaattgcactgcagatatatatatacataaatataatattaggttggtgcaaaagtaatcacagcaaaactggccatgtgaatatatataacagagcaattgctcagttaatagttttaatgaaaatttaaaggtccagtgatgataatatcacaaagtgccacaaaagcacagaagaggcaactactgtctgagggttataatttcgctaggtttgaaaagaattgttgctcacccaaccaagaatggggtaaatgttattaccgcaaattatttttcatgagaaaatgcccagagaagtggaagagcagggtcttttcaagtaggtgtggtggtaggtagaattagaagtggattcaaatatagggctgatgtagctaactgggactaaattttggagtaagttcattgtgtccaccctggaggcaattaataagcatgttcagaaatgggatttataaaattgattctggagaccaggatgctaaggcaatggagtagagagggagtgggagagagcaagatggaatttagaaggtgaaggtaatgttgtacatgagtgatgatggcctgaatctaatatggattcgtggcaaagaagatggagagtagaaaatggagtggggaggaatttatgaggtggagagaaagccctgatgactaagtggacgtgtggtatgaggtggtagaggatccaaggatgtcattgagcctgggctttggaaaggttgccaacatctattctaagaagttggagaaaacactcttcatgcacttatagaagtccaagaggtaggggctgagacaagcccaacaccctattcattggctcagtcagatcctgatagtagctgtgggctattcatgttgtactgtgctagcattgcatggatatcatcacctaatctttagagcaatgctatgaaacaggtattatcattctcatactattcatgaggaaactgaggctcagctgtgttaggaatctaattgcatacaacgagcaacccttggagttggaaatcaaccgagatttgcctgataccaaaggccctgatcttcaccacttccctctatctgttcctcctatagagatgtctaccacataggactcataaagaggatcacctttttaagtgaagctcatgcctctccaccatcatagattatttcccttggtgtaacatgggagaacaaattctgactgaagccaggttgtctctctctttttaaaattacttatttatttttaatttttaatttttgtgggtacatagtaggtgtatatatttctcttttaagttatttataatagcaacatttgacgtagggataaaactcactgtccccattatctgtattcattcattcactcatttaccagccaccatcagttggtagcattccaccaatgctttctgctctcctggcactgtgccaggctctgtgtccactatttcaagatttatttttttaatttttatttatttatttttcagacagactcatgctgttgcctacgctggagtgcagtggcatgatctcagtctactgcaacctccacctcccaggtcccagtgattctcatgcttcagcctcccgagtagctgggactacaggtgtttaccaccacaccaggataattttttgtatttttggtagagacggggttttcctatcttggacaggttggtcttgaactcctggcctcaagtgatctgcctaccttggcctcccaaagtgctgggattacaggtgtgagccaccgcgcccagcttgaagatttctaaggtgtttctggaaagttaccctgctgactgtcctcatcttaccatcttttatggaaaaacatttccctcttggcattctgggagttcatagaggaatgaaacctttccatgttcctccatttctgacattgttggaaacgttgcaggttttatgttttgttttgttttgagacagagtttctctcttcttgcacaggctggagtgcaatggcatgatctcggctcaccgcaacctccacctcctgggttcaatatattctcctgcctcagcctcccaaatagctgggattacaggcatgcgctgccacgcccagctaattttgtatttttagcagagacggggtttctccatgttggtcaggatggtcttgaactcccaacctcaggtgatctgcccacctcagcctcccaaagtgctgggattacaggcgtgagccaccatgcccggtaggtcatttttaacttaacatttgaggagctgtgttgacacatgtcctacccatcagtcttcagggaaattaaggttttaatttcaatccagcctaaacaggtagtggtaaactctccacatcagggaggaccaggctggcctgccagtgggttaggatgcttcaggtgtgactgtttcatctacggaatatggtggtttgcagaataagtgttactggatagttctggtcacccagatactcatgcctactttgcaaattagatttactcccaaagtgagcgtactaatggaaagcagtttgtatggctatcaaaatacagtcactactacagacaacagggtaagcctgcccatcatgaatgaaaaatcacagacctcagagttgaagatcagagggtagctaaaactttcttcactctaaattgatagaatttttctacaaaaatcagatcattgcttttctcttaggttttcaaattatctgttgcagcatgcaccacattatattatattcacatttatggctgacttccagctagttgtgagctcatagattttagagattatgctgggttcacctttagccctaatgcttagcactatgcctggaacttagaggatcttaataaatatcattcagagctactactttatttatcattgttaacagggaagatcataggactctacagaaaaaaaaaaaaaacaaaatcttaattcattcaaggtccttctctgtactagtcttaaccaagatgaatggtaaaagaatatgtttgcagcagggtggagtggatagttttataaatgaagatggattataatattatgatactgttgttttattatatatctatcataaaagaaaataatcttactaaagaataatctttggtcctttcaattaatgtaatggagactctcaatttagctggaagagagattcagtcttgcctgggcatgtctctggaattggtgggagcagctgccagaggctgtttgcatatggattgaaggtcctcttgggagagttctcattctgaaggaagaagttgcctggcaacaagagtttgacccatagagacagccttacccaacagaggagcaaggaagcctgactactgtgtgatgtctgtcacctagatccccctcccagcaggatgacaatttatacctaggagctatagagagtagagggtttgaatgtacaaagtgggggaaaataaacttgcattactaatcttttttaaaagagtggagtacaatgccatgtttcaggatctatgtgataaactgaaacataaatagaagggaagcatccctgcttttttttttttttttttttaactaaaaacagtttgggtatggtaatgtcaccaaagcattcatgacaatgcatggcaaaccagcaacagtaccaggaggaagactttgaagcccagtagagcatgaaggatagacccctgtaggatatgatagtatccagatgatactcattggaacatggatacacctagaatagagtagcagacagagtgacaaagtgatactcagcagaggactgagggggaacagttgcacccagtggaacagtgagtggatggaaaataatggtactagggggtggatgtgaagcagcatctttgtctgggataatacctgaggttcgtggtctcacgccaagaagattgaggacacggacacacacacacgaatgagtttagaagctgaggtttaataggcaaaagaaagagaaaggaaaacagctctctctctgagagagagagagagagagagagagagagagcgcgagccgccccagtgggaatcccagcctgcctaccgagtgcaccagattttatacagaggcttgaggaggtggtgtctgatttatgaagggcctacagattgattggaccagttgtgacgtttatatagagcgtggggaaggctggctgccccactccaatcttattatgcacatggacttttcacttggctggcgccatgttgtctgcttcttactgtacacttggctggaaaggagaagggaagacggagccacaattttgaacatgcctattcccaggcagccttttcctactggcacagctgctggcattcacctgtgcaaggttctagcttgcttgtctatgtctgcagctggattttacaggctgttctttgttagaaaagaaaatgatttgggggctgcttttcattaaaaggaaaaccttaccctcactatctgcctaaatgatttcttcttaactcctgtatcagatgttgatgtcaaagggggagccatcaaaggattttagagctctactataagcctaattgaactaacaactgctactggacttaacgagatcatgaatctctagtccaggatgttagaaagcctgcatcccatggccgtgcacaaaaagtcactgatagttaacttttcttttccaaatggaatttttttttgttcaatgtggtgctttctttaaataaattctttcacaaactgaggaatcctacattaattcaaatatttaattcatatgcatgtgttttctccaatttagtcccacagggaattcagttagcttataagaatgcaaacactttagcaagttttaacaaattcagaacaagtgaaacaactacacttaatctctctctactttatttaaactttaaattgggatttcagctatagcattagtataagatgtatgtgaatttttgtttccatagcttccaagctctttggctgttcagtatagtgtttatcataacccccactattgggtgagaaaagccaatttaagagactgagatgctaacactcaaagagggcaaatgacttcactgagttgtacccaaaattgctgtcttttcctaacaggttttttttcttcatttccttcttttgcctgatcaaataacacagagaaagtggtcctatttagtaagttgaaatacctctctgatacccaatgcaatacccaataagtgtacattgtgccttatggaattgacagatcgctgcgagggccaggtgaggcagtgactgagctgcccaaaacaagtgtcagtgagtggccacattgattttaagagcctatcaagtaagcataaattaatcatgaaaacaatcaagtttaaatttcagcttgtttggagtaccaatccttgataaaaaaggggtgggataatattttttccttgacacttgggcttcccattgaacttgagttactttccacctaaggggaagtgttatgcatttttggaacagaacccagatcaatgcaatatagagtgtattctttttattggtgttgtactctttattgtcaatcctggaataccagatctagaaataaaatgggagtagaattagaaggaaactagaatgatcaaattccatctgtataacaggtaatgtcatacagtattttattttgtgtgtataattttgagctttatctattatttatttattttgagacagggtcttgctttgtctcccaggctgcagtgcagtggcatgatcatggctcactgcagtctcgacctctagagctcaagcaatcctcccaccagagtagctgggatcacaggcatgtgccaccacacctggctaagttttcgttttgcttgatggggatgggttttcaccatgtttcccaggctggtcttgaactcctaggctcaagtgatctgcccatcttggccttccaaagtgctgggattacaggtgtgagccccaagctttactattttatctcttcataagctactccaaaggttagtgacatgtattacccggtaatttttgaatcacaaatgtcaacactttcagggtttgcaggaaccctccagctgatgagtgagattaatcagagcccaccatccacatttcagtgatttcgttctatttatgtttgcatagcattttataatataaattacatgttctaatagtattttaaaatttgactatacctgaagtgctctgaatatatctttcaaaaacgtcaagactatatggaactatggaactatcaaaaagatgtctgaggttgaagccacccgccttttattttattttattttatttttttgagactgagtctcactctgtcacccagcctggaatggagtggcgccatctgggttcactgcaacctccgcctcctgggttcaagggattcctgtgtcagcctcctgagtagctgggactacaggcatgctccaccatgcccggctaattttttatatatttttttttcatagagatggggttttaccatattggccaggctggttttgaactcctgacttcaagcgatctgcccaccttggccacccaaagtgttgggattacaggtgtgagtcactgcacccagccaaagctaccctcttaataggagttggagtttatgtctgtttgcttcctaagaccacactctttatatcaaaatgtgctacctgcttggaggtatttttgcatattatgttcaagtttatgagcaaaataattttaaactctgcttacagtaaagtagttagcaaaaccactgtctgaccttgaacttattttgaaggatgttttagttgatgggaccttaaatcactgttagaggtggctacacccaccatctggcaatatgaaaagcaatttttgccttgcaaagtgaggtcaggatctaagccaagagacaacttgtccagggcacaaggcccaaaaagagcaatcaggagacagagatgttcttccttatctggtaaatgtgagatatctcatactttgagttagggatcaattcagatacacccagattctgacttcaacatcctgccatggcagtcaaacgatactctaaggttaacatttttaaagttgtttttcttgtttttttgttttttgtttttttgagacaggatctcactctgtcgtccaggctggaatgcggtgctgcacctgtagctcactgtaacttcaaacccctgggctcaagagatcctaccacatcagcctcccatacaactgggactacaggtgcatgccaccatggccagctaatattttttttagtagagacagggccttgctacgttgtcccacctggtcttgaactcctggcctcttgaagctatcctcccagcttggcctcccaaggcacggggattacaggtgtgagccaccattcctgaccccaaagttatttttctgaaaggaaaacaaagattacccttagagagtttagggtagcttttcaataattagctactcttgaagatgactgacattctctcaaatgccatttcctcatctttcccatgtctgtcagtcacattattataacatagataactggtgtggggggaatcttactggtgatagtccagtgctctttatgacacattcacttctctaacccatggagacttccataggatgctcagtgttatcctagatcacaggtgtccctgtcctgatgtcaggttaatgaaggtggcttgtggacttggatatttctgggaaattttacaaggggtaactaaagtaaaagagaaagaaatgcagaaaaatagaaacagaaattctcaccatagaagcttcattatgtatttgcaagatattcacacactctagattttctaagacagttctgaagttaaatcaccttattcttaaaaatatgatggattatgcttatgtttatttaagtgtatatacatctgtgttgggtattcatgtgtaacattttagagctcatattttcatggctgtctagttttctttttcttttttttttttttttttgagacggagtcttgctcttgtcaaccacgctggagtgcagtgatgtgatcttggctcactgcaacctccgcctcctgggttcaagcgattctcctgcctcagcctcccacgtagctgggattacaggcacccaccaccatgcctggctaatttttttgtatttttagtagagacagggtttcaccatgttggccaggccagtctcgaactcctgacctcaggtaatctgcctgccttggcctcccaaactgctgggattacaaatgtgagccaccatgcccggcctgttttttaagagacagagccttgctgtgacacccaggatggagtccagtagggaaatcgtagctcactgcagactcaaattcctgggctcaagtgatcctcccacctcagtctcctgagtagctgggacaacagtcatgcaccaccatgcctggctaatgtatttgtttattttttgtagagatagggtcttgcttaattgcccaagctggtcttgaactcctggcttcaagtgattttcctgccttgacctcccaaattgctgggattacaggcgtgagccactgcattcagcctgctctctagttgaatgacttcaggcaagatactcaacctctttgatcctaggtttcttccttattacagcatggagactactacctaggtaatatggttatcgtgaagagcaaatgagaatcagactaagcacattgtagatattcaacaagtttacacatttgaaaatgtccagaaggaaatttatcacaagtacttgtcttcattggatagtgagactatgaatgcgtggcatgtgtatcccaggctttcctagcttgccaacacaagtgacaactaatttatgttaacaacactaatggaaacttagtgaatgcttactatcagccaggcaccctgctaagctctcctcatggattatctcagagatcaaccagatcttactggcttgtgtcctcagctagttgatcaaaatttagttttatccagatcccaaatattttggagacttcccagtgacatatttacatgtccttaaatcatttttctccaaattctacttgaccatttgaaaatggatatatgatcctcaaagctagatcaatgcccagtagttttccttttttcctaactcctaatgggtgctgatttcatggagtcaggagcccctgatagtttgaggtttctaaagtactgctgcagccaaggttaagcctgggatttggcctcgctcactattaacaactgataataaaatgcaatcagaaatccccaatgtttctgttgaaggatccagaattctagcaaccctaagatattgctgctgttgtgctggggattggtagtccaagccccagccatcccaccaggttgtagctgcagttgaaaagtccactcctaaggtctgttacacccaggaaatcagtgtctgggtccaaaggatcattggtggtacacttcttttagctcatgaacacacacaccccatgcatacacttaggcaaatggtgcacacacacacaaacacacatacaccatgggcatgttccccaaccccacacatagttcaaaggaagatgggttaaaatttatctgtgcttaccttgtaactgattctagattacttagttctgagcttatgtgttgctttcaggccttcttggtctgttccatttgctattccagcaactgacttcctttcaggggtttcactgcctttttcagtgacccctcctgggctgggcctacatagcccatgagacatagattttaccctgttaattttttaacatagttggaatcactatcccattccatatttcaccaggggaatccctagttccctatgtaaatatcaggatgtacatggatgcttgcagaggtgagaagggtgctccccagtttcagtcaccagctgcaccaatatcccaaaggcagatgcatgtgttaaataaaaagtaatgacaactaacagtgaagattctttatttttgaagcatttttcttgtgataaaaaaatagcgactcttatcatagcttaggcctgatttttacaattttaactgaaggttgggtggctctgtggctcatgcctgtaatcctagcactttgggtggctgaggcaggaggatcacttgagcccagcagtttgagaccagcctgggtaacatagtgagaccgtttctaccaaaaacttgaaaattagccaggcatggtagcacgcacctgtagtcccagcaactcaagaggctgagatgggaagattgcttgagcccaggaggttcaggctgcagtgagccatgattgtgctacttcactccagcctgagtgacagagcgagaccctgtcttaaaaaaaaaaaaatagccactgagtttaatcataagagggtatggaaattcacactctcactttggtgcattgggaaaaaagctctctaacctactccattaccataaacagagaatccgttcctctggtatgtttcaaatgatcttacattatcaatggattgattaacctcagtaatgatttgttggacggccactattaataataaagacttttaaataactccttgtttcaaaataattattttttcacctttattataattatataaagaagatgtacccattttatgagtacatttcagtgagttgtgacaaatgttagcacctgtccaattatctccctagtcaagttctatagcattgctgtcactccctatcttagtccattcaggctgctataagaaactaccataaactaggtagcttataaacacagtttctctcagttctggaggctgggaagtccaaaaactgggtgctggcatggttgggttctgatgagaaccctcttctgggttgcacactgttgacttctcaaatggcagaagggccaaggcagcttttggagtctctcttacaagggcattaatctcattaacagggctctgtactcatgacctaatcactgcccaaaggccctacctcttaatgctttcactttggggatttggtttcaacatatgaatttggtagtgaggggtgggccgggcacagccattcataatatagcacctcccaggccaggcgcagtggctcatacctgtaatcccagcactttgggaggccaggacaggtggatcacttgaggtcaggagttcgggaccagcctggccaacatggagaaaccccgtctctactaaaaatataaaaattagacaggcatggtggtgggtgcctgtaatcccagctactccagaggctgaggcataagaattgcttgaacctgggaggcagaggttgcagtgagccgagatcatgccactgcactccagcactccagcttgggtgacagagcaagactctgtctcaaaaaaaaaaaaagtaaacaaatatatatgtatatatggcactgcccaaatccccctattaacctgtcatctaggttttaagctctgcgtgcattaggtatttgtcctaatgctctcccttcccttccccccaaccgcctgacagacctggtgtgtgatgttcccctctctgtgtccatgtgttctcattgttcaactcatttgcagtcagtctctcctaagcacatccactaatattatttctattactgtagattggttttgcctattgtagagtgtcacagatatggactcatacatgaagtatcctgtatttggtgtctttaattcagcataatgttgttgatatccattcatgtgtttgtgtatgttaatagttcatcccttttattgcagagtagtattttcttgtgtagatacaccacagtttgtctatccattcatctggtgatggacatttgcactgctttccacttttcagaagctgctgtgagcattcacatgcaagtctttttgtggacatatatttgcattttaaaaatacctaggggtgaaaccctaagtcctgtggcacatgaatgtttaacttgaaaaacactgccaaattgttttcaaaagtaactgtgtaattttacacttaccagcctggtaggacagttccaatttcttatcagcacttattattgtcagttttgtttaaaaaaaaattctagaaagtatatagtagtattatgtggttttaatttgcatttacctaatgatactgaacgtctttccatgggtttatttgccaccaatatcttttttttttttttacaactctcaattttacttcaacaattacctggatatcaagtgcttgaataaaacttttagtaatatttaaatgtttcagatacaatttgtcttataaatttacatatagaaaattataattttgcattctattttctggaagatttttctttttccaataaattttttttttggggggatacgtttgtagaatgtgaaggttcattacataggtatacatgtgccatggtggtttgctgcacctattaacccgtcgtctaggttttaagcccggggtgcattaggtatttgtcctaatgctctcccttcccttccccccgaccccgtgacaggcctggtgtgtggtaatcccctccctgtgtccatgtgttctcattgttcaactcccacttatgagtgagaacatgcggtgtttggttttctgttcctgtgttagtttgctgagtgatggcttccagcttcatccatgtccctgcaaaggacatgaactcattcttttttagggctgcatagtattccatggtatatatgtgccacattttatttatctggtctatcattgatgggcatttgggttggttccaagtctttgctattttaaatagcgctgcaataaacatacgtatgcatgtgtctttatactagagtggtttataatcctttggggatatacccagtaatgggattgctggctcaaatggtatttctggttctagatccttgacaagtcgccacactgtcttccacagctgccaccaatatcttatacatggtgaagtctattcaaatcttttgcctacttaaaaaattggaatgtttagttcttgtattcagttgtaagagttctttatatattgtagatacaagtcttttgtgagcatataaattagagctatcccctcctcacaaagtaatgacagttttgttatttaagcctcatagcaaaaatactacatacagctaatttatgtttaatcttttttatatttccaaaatgtatataatagaagatattaactttattttttaaaaaagaaaaactgatcatcagacctttgtttccacactttgcttcaaaaagtgtgcttagaatacatatatgacttacctagagtttttttttgtaatacccgccagtccagaaatagaggtggagaaagaaagatgacttcccagcaaagctttgacatatgcaaaatgtaacttgaagatgcagtatctctttttttttttttcttggctccctaatgtgatgtgccccttccccaagtgctcctatcccagaagagtttaagcaggcttctttccagggttgttattgtatttttttggatctatcaaaagatttatagcagcagcaaggccaaatgaaggaggaatttgtgggtctgaggggccttactgagaggccctgaggtaacactatattgtaatggttcaccttacttacctttaaagaaggttttaaaaagagtaaatcagagctgggtgagttaatgttagtgaaggaatacagcagctctgtcacatgggctccttttgtaggaggtatccttaggcttcgtttaatttcgaattggtatgcaaccaagagtgcctcctgcatctctgagtgtctccactgtggagtgccctggtggctcatgagaatgcattaaggggcaatccaggtgggtggcaagacaaggcaggactgttcacactacctctcttgccccatcactttacagcattcttgtaccatcttatttttctccagtgacataaagagcactctgccttgctttgtcaactactgaagccttgtaatacctatcaagacaataagtgagggagagcatttgaggagctagagaagagagctgaaggaaaacagctactaaatttagtaagagaactggtgtgacttacatgagatatagaaaacaggcaaacccatagaagcagagagcagaatggttgttgccagcagctgggggacaggggtaaatggggagttgctattcagtgggtataaagtttcagttgtacaagataattgagttatagaaatctgccatacaacattgtgcctacatttaacaacattgtatgataaatacagcattatcaatatattgaaaataaagacagtagagctcatgtttagtgttcttaccacaatagagagagagagagagagagacagagagaggggagagtgagatataaagagagcttttccaggttttagtttgtgagacatgatttgcttttttaattggagtttgggatgaagaagaggaaatttggggttcctgccaacgtatgagagaagaaaaaaatagcaaaatggaaaaaaagataattttaagaagatcttcatgagtgtgcataaattatgattcctttttgacctgtctaaaggcttgatttgcttttctattactttctagttccagggtggtgttactttgtgtgcagttatgatactgagtggtggttcatgtttatacagtttgtacttggaagccatgagggtgtgagattctttgggaagacacatctcacttttatctaagaagttttgaaaggatgccaatgttgagttaaaagataacccctactgtgggagtatgtgtcagtgatttcctcactcagagttcttaggaccaaattaaactccaggagatggtcatgtcacttgttgaaatctcaggcactcttatcaggacctcttaacctccctatggttggagcatcttctactgacttatttaaggttattagtaggaccattttttggaaagatgtcctgcaattcaacatgtttgtaatgagacataccaactctgagtcatcacataatggagatttccagaataattggagagaatttgggttcctgtcagttagatagtatttgattctgtagaaggagctgactcttgctgctatggtttcaatgtgttccccaaagttcatgtgccggagatctaatccccaatgcaaccatgttgggagatggggtagcctagtaagaagtgattaggccaggaggtctgtgttcatgaatggattaatgttatcataggagtgggtttgttagcatgagtgagtttttgtaaaagtttggccctctcttgctttctcactgtctccctcccttaccctccaaccttccaccatgattgacacagcatagaggcccttgccagatgccagtgccatgctcttggacttctcaacctctagaaccatgtgtcaaataaatctctgtttgtaaattaaccagtctgtggtattctgttatggcaacaaaaaacagactaagacacctgtggagagtacagattgattatggatgaactatctctacccgtagagaacaagacagaagcagtagcagtcgctggtttagaatgtgtatcaggcactgttgggttttgcccaaagctcctctgatctcttttcagcactgtggtcctatgccccggtccttgctgctaatggctaatagctaatggtatctatttgcaacttccagaacattgctctgtgggagtttgctttcagattccctttccactttgtgttggttcatagccaatgactgaatgtcacgggagtaaaataacccagctcctggaacagcaaactccagggttgaatttatgctagtggtctctgtgagagcaggctgaggctggagtttcaggatcacaccttgtttggtttcatctttccttactctgcttttctggctccctttttgatttcttctggaagctctccctcaataaattactgcacctaaatttctgactcagtgtttcctcctgggacaacacaactataaccagaatggtgaatgtcttggagatattgaaaaaagccagcagaaaatataagctgtttgttgttgctgttcttgtatcggtgtctcatgggcagtatgtgtccacagtcgtatagaattgtcgattttcaaggtttcgtggcgactctgtccaaaagaactgacaaataatcacaattaacctggctctgccatgtaagcatagttactaacagtccactgtttaaattttgaaagcaaagattatgcattatataatttaagagaatcttgttttgagactgagccaaagtaacacaatttattatatcttaggattataaagaaagaaaatgtaacaaatacatggaagataggatgcctaagattgagaagacttcagttcttatttgaccattttaggaatgcatgtgatatctcaagtttaagaacttaaaacagaactaccatttgaaacaacaatcccgttactgggtatatacctaaaggaatagaaatcgttctaccataaagacacatgtacatcacagcactatttccgatagcagagacatggaagcaacccaaatgcccatcagtggttagactaggtaaagaaaatgtggttcatacacaccatggaccactgcacagccataaaaagaacaaaatcatatcctttgcagcaacatggatggagctggaagtcattatcctaagccaactaacgcaggagcagaaaaccaaatcccacattttctcacttataagcaggagctgaacattgagtacacgtggacacaaagaagggaacagtagacactagggcctacttgagattggagagtggagaaggataggtacctattgggtacctatgctcattaagtgagtaacaaaataatatgtacaccaaacctctgtgacacagaatttacccatataacaaacctacacatgtaccctctgaacctaaaataagttgaaaagaaaaaaaaatgtaaaccagtaccaattatcacactgaaaacaaaatcttttgtaaacattgtaacactaataaaacttgaaggtaaacaagaaatagatttgtctcttcttattaagaatttcatcctactgagattcacaaacacactaatatattaccttatcttctaatgacttcagggataatgattttatatatacatataggattgttattgttgtgagagggaaggaagttaagtaagagcaatagcttagtttttgaaataaaagtttacaatgtttttactcctggtaaagagaagttttggaagaatcactggacttatttatatcgataattctaaattatctttgttatctgaaaagtaaatagttgttatttaagcattaaaataaaaagcaaatgcaagcttctttatgatttaatctagtgaatagttaccaccttcctgggtatagtaactgattcattttttactctaaatgaagaggcagtttctgctggagagaattactggttcatcatattacatgggaaaacacagtctgggaattgaaggacacttagcataattttgagaacttaactgtgcaccagataatacgtggaaaaaggactcaattatattaaaatttaatcgctcttgtagaaatcttcgctatatgcctagcaactgaagaatgatactaaaaaatatgataaggtcattaactgacatatttgccaagaattctaatgagatgggaataaatgatcaaactatattacatttttaatgtaaaatattttactatctaatattttaatattaaaaaagtaaacatgtactctcaatcatatatattaaatatgcatggaaaatatggtattatgatacttcataaagaatattaatgagtattctttgatggtagaatcttaagtgatgcttattttcctctttatatgtttgtgtctctttaaaattttctacaataaacatccattcataattataaaaataaacacttttatggaaaaaactcagttctatcagatatagctaggtgggtttgaggctggagcaaaacttgagcaagactgtttctcctgccattttgtaattttgtatccaatgttggagtctcagctttctgagagcagacatcactgtgttgcatatgactggtatgtggcaggcagtccatagataagtgttaaatgaatgaataaataaaaatgatgaggagcaaagatgggcaaccaacttaaagaagcaacatgtggaagtaaatgaaattggtaaatatcaatgtggaaatgaaaaaccacagataattcagcaaggttgcagtgtaggcagttagagggctggggtaggaaatgctgtctcagtctctgcattacagtgtcttattgtccctatgacatcctgccaaatgcttattttcccccccattttctagatgagaactgagttttcctaagcttaagtgatttgttcaaagttgcaacattgttaagtaaaattcagatttgaacccagctctatcctgcttccaaggagccttcttgttcccctgcactgcagagacagaggtctggaaacctgtgtaagcagataggctcttgcaggtaacagaatgccattgagttttgagaagaggaatgacgggatttgtagggcatgaagctgagccaaggggcaaatcactcatctcatttctcccttccagtatctcttatgttacctttacagtacctgaactcccacccttcttgcccctttgggttaaggttcagaagagcttgggtaaaatgctattgttacctaggaagggtatcccaaggcatgaataagttttcagtatgcattatcagagggtaaacccctgaaggaagtggacacatttctttttttttaaattcaataatcctttatggaatacttactgtgtgccattcactgtctagatttttgatacacaccatgaatgagaccgatactatctctgcctttttagaatgatggcctaagaagcagaagtgatcatttttgttgcatatgggagaaggtagacaaaaagtttgaaaaggtaaagtgatgatgcaaacagagtccaggtagggaagagaatccactatggaagccaggcattacagaggctcacatggtggcctgagaaagggaggaactcggacagggagcttggagatcctgtatttcacagtggagctgtcctcccatccttaaaacggcgtgacaacatcacgtttcctctctagataacctcagtctagggaagggattaacacagtagaactatagcatgaatcttgcctgcaagagaaaaatgagctttgaatcattaacaagggaattgctgctacatactaatgatgctatttcccggccctggtctttttacattaatgcaccctatggtgtgaactgaatgatataaaactgattacaggctttggagatatttctggttttgattgttttatgtcatgcaccacttgtttagattatgaattaactaatctgcgttactccctaagttttaagattgaaaagcccttactcctttctctgataccaaattaatataactatctctgatgacagccaatgaagactaaacaatagccattcgtgtgatttacttcacacacacagggtccccacaactcccacccatcttttctaatgattgagagaatgtctccagtattacgaataatttattctagactcaatgtcatttatcttagcttgtagcagcctgccttgtgcaccttagactcaacaaatatttatttaatttataatttttcatatattttgatctattttgaggaatctagccgaacataacaattctaaataggacaaaaaaataaaattatactaaaggatatttaccatatcttaagatacaggaaacagtacagtgtctttcctagtctagctcacacaccactcaacacttctgacactaaaatgagtgtgcaatgagagataggtaaaccgaactgattttttttccctactcgcttacaaagccactcatatgacacagaatgcttctgtgaccagatgtgtgggggggttttctcctcacaccaaccaactggatgttctataattcaatttaattctgatgctatttgcctgaagatagtgtcagatccaacacgttaaaggcaaagatgctagttacaagtagtaggttgtcacctatacttctgactgaccagctggctataaactggggctcccatcactcactccttggattcaattaatttgctaaagtgactggtagaatgcagggaggtgccttacttacgttaaccgacttataaaggattttacaagggatgcagatggatgccagatgaagagatggatacgttaaggtatggaggaaggggcacagaactcctgggtctctctgcaggtgcatcaccctttaggagtctccatgtgttcagctatccagaagctctcagaacccagtgcttttgcttttttatagaggcttcattaccaaggcaagattgattacaacattgatcactggtaattaatttaaccattagcacttctctccctggaggtcaaggggatgaggctgaaagtcccagttctctaatcatgctgtggtctttctagtgaccagcctccatcctgaagctatctagggtctcccagctactagtcatctcattagcatacagaaaacactcctaacactcaggagattccaaagagccatgtgtcaggaactggagataaagatcaaatatatatatttcacagtgtcacaccatagtattatggagatggagatcaaatatgtatttcacaatgtcacaccatagtattatgtatggtataaaaaaaggaaagactctaagcatctaaatatgctaatataggaaattattaaaataagtagggcttttcaaatgatgaaacaatatacagccatgtaattttttttgcaataacagggaaagatggtgatgccaaggcattatgcaagaaaactgggggcagattttattaacattattacaattttgtaaaacatatgtagaaatcttagaaagtatgctaaagtgaaaagagtggttttctttggataatgataccatgagcaataatttttttatttgaaataggtttttccaaattggaaaaactattcttgaaaaaatttttctatacttatccaatcatcaatcatatgcttgtttgagggaaaattatgcaaattcctctaaaagtctgttgtagctatgaagcccagaaaactggaagaatttctgggcaatggcaagtcagtgctgatacctttccctaactaagaaatgtctcaaacatgggtcactctacgggacactggaaattccctacaccactctgagaggctgactactgatctttgctgacacttcaaatggtattagaaagtggactgggctcaggattagaggtacatacttatgtcgagagcagatgagaatcactctactccttaggaagggcttcaggttatgcctgtaatcccagcattttggaaagctgaggtgggtggatcatttgaggccaggagttccgaaccagcctgaccaacatggtgaaaccccatctccacttaaaaaaaaaaaaaaaaaaaaaaggaaaataaaaaattatccaggcttggtggtgcacacttgtaatcccagctactcgggacgccaaggcaggagaatcacttgaactcaggaggtgaaggttgcagtgagccgagatcatgctgctgcactccagactggtaacaaagtaggactctgtctcaaaaaaaaaagaaaagaaaaaaagggcttcaggaatcacagagctagcttatgattctgttcttttcagacagctggttagtggtaaaataatgctccctctcctgactcctaattcagttctacttccaacacattaagttgaaccctatgaaattgccatatttgtagatcaaaatggtaaaataatatgaattttgtttggttcaaccacataggcttgctcaccttgatgcaatttatagaaattttttttaaaaagagtttcctttcaaatcaaagcaaaacaaatttatacttttaatgatgcctgaattttttaaagagacaaacttccctacataatcaatgttctgattcctaaatcagaccttcggtgtaaaaagagaaagtcccaagtaaaagtgatacatttacttatactgtgtaaatgacttaaagtaaaccctttcctagaggtcaggttaagcagaaaaacattgagttcctgaaaggctggataaaaaatagaataggaaataaatatatattcaaatattacttgataccgagctagtcattttcataactgtcattgtatttagccccttccaatgtctttttgagctaaatattatcatccttttttctaatgggtaaactgaagtagcctgaggttaactaaattgtccaaagtgactctgatggccgaatactccacatcatgatttttttccctatatcttactgcatccataagaattgttgcaaggcttatatattcttttctaattaaaaaaagtactctttctgattaatgtattaacttggattggtttcaaatttcacagtggtaaaagacatatagtttaaagtcctgtcaaatcttcagaagccggtcatagtgtgtaacaaagctataagattttctctcctgtttccgtttccgtttttttttttttttttttttttggcttccaatttagtttctcctccaactcacctgagtttttgctttttaaaagtacaaacagtagcaagattcatttctagcatgatgtagtgaggaggtcaataaatcctttaccccaaaagcagtaaaaatctggataaaactgtttaataccagccgtttgagtgctgcagaaattggcccaaggcttaaaaatccaagaagcatttattcacaaaagctactgaacttcaagtaaaattggcatgagtcatggtgttttcgtctaagcagtttctacccctcctctccctaccccaaccctgtgggcctggcagatggaccagggcatggcaagccaggaagaccaggatctttgctcacagcgccagaggaagttcattcattggtgtgttattaaagttgttcttagtctctttaaaagatagaaggttaatagaaaattaatattattgctgagtacatagcatttacggatgttctttccagaaagctgttcaataagacagcacaaaagaagagaaaggaaaagatgtgtatattaaagtttactgtattgagttagcataattttgaagtagactgtactatgttaagatgcgtattataaaccctagatcaaccactaaaaggtaattcgagaaatatagggaaaaactcaacatagaaataatatactaaaaatattgatgtaacatgaaataagttataaaggagaaacaggaacaaaagacacagacaaatcaaaatggtaattgcaaatccaaccataccaacaattacactaaatgtaaatggaataatgagtaagtgtctgttaaggtgatagtgataggtataattagtggaattagagctgttgaagtaaggaaggagtatacatttactacttttatttggggttgcaccaatattttggttcctaagaccaatggaaaactcttatcctttaaagattgagaaagctgtattaaaaacactccactcaaaatgtagattgtcagactatatataaaaaaatcaagatctagtgtaatgctacctacaataaatggaccttagattcaaagaaacaaataggctaaagtaaataaatggagaaagatataccatgcaaacagtagccataatatagctactgcagatctcttaatatatactttaatgcaaaacaacttttaaaatgaagaataaatttagaggacttacactacacagctttaaaatgtactataaatcttcagtacttaaaacaatgtggtatcacgtaaagatagacatagagatcaaaggaaaaaaatgaaagttcagggatatatccttacatgtatgaccaagtgattctttacaaagatgccaagataacagaaatgaaatggtgctatgacaattggctatccacatatgcaaaagatgaagttagaccttttgcttactgtattagtcagggttttcttagagggacagaactgataggagatatgtgtgtgtgtgtgtgtgtgtgtgtgtatatatatatatatatatacacacagagagagagagaggagtttattaagtactaacttacacgatcacaaggtatcataatgggctgtctgcaagctgcggagcagggaaagccagtccgagtaccaaaactgaagaactgggagtgcaatgttcgagggcagaaagcatccaacatgggagaaagatgtagactgagatgctaagcccacctctccacattttttgcttgctttatatttgctggtggctaattggatggtgcccactggattaagggtgggtctgcctcccccagtccactgactcaaatgttaatctcatttggcaacaccctcacagacacacccaggatcaatattgcgtccttcaatccaaattgacactctgtattgaccattacatttacacatacaaaaaaaaaagcctcaaaatgagttatacatgtagatgtcagtgctcaaactataagacttttaggaaaaaatgtgggagaaaatatttgtgaccttggcctaggcaacaggttcttagagatgatactattagtcatcaaaaaaaaaaaaacaaaaaccagatgattgaactatattaaaattagcaacttctgtgcttcaagagatacctttaagaaaatgaaagatacagctgagaaaagatatttacaaaccctttatgtaatagggaatttgtattcatgaaacataactcttacaatttaataagaaaaatctagtgaacagtatgaacaaaaggtttgagtaaacatttcatcaaaaacatgggagcaggacatggtggtgcagtcctataggcccagctacttgggaggctgaggcaggagaatctcctgagcccagcagtttgaggctgcagtgagctctgattgccccactgcactccagcctcatgacagagtgagaccctgtctctgaaaaacataaaatagaccagcctgtgcaacatggtggtgagaccctatctctaaaaagtaaatagctaaaaatgaaataagaaattatttttaaaaatatgaattactaatgagcacttgaaaacgtgttcagcaccattagttaataagaaacacagtgagataccgctttaaacacactaggatgaccgtcatgaaaagacagttaccaccaaatgttggcaaagggttggaactgaaaggggaaaaattaaggtaatggttaaagaggctggtagagacagaagcaagagtctggcacctggtgtgtagcatgatatttaggaagcttcaaagatggggagaaactgttggaaatgtaaaatggaacaacaacctaggaaaagtttggtgctttcttaaagagttaaataaaactgaccatatgacccagccgctctattaagaatctacccaagaaaaatgaaaattatgtcttcatgcagattgtacactactgctcatagcagcattatctctaagagccaaaaatggaagataacccacatgtttataaattagtagacagacaagacgaaatgtgatatatccatatagcagaagactattcagtaattaaaaggaactgaatactgatcaccagtatactgatgtatactgcaatatgaataaaacccaaaacctttattctaggcacaaaagactctatattgtatgattccattttttaaaaatatccagaaaaataatttatagagacaacaaaaatataggttgcctgggactgggggtgagaacagtttaaaagcaaacatgcttgagggaattttggggggtgatggcaaagttataagcctggattgtggtgagagttgcacaagtctacatatttgctaaaggcattgagctgtaaaattacaaagaatgaattttatggtatgtgaattataccttgatataaaagtaaagtataatgtgaacctggaaaagaacatacatagggaaaaactggctatgaccccttgatgcgttcttccaaggtgagaatgggaaccactgattatttacactgcttggtgtggaaagtttgaagccctcgccttgaactagcatgggaaggtagctctaccttgaagagcctcttgtttttgttcttgaaactgctgggatggtcatggcttatgtcttctgggtgtaaaactactcatcaatgcttgctccttttcagtattttggggtctcttccagggtgtagattttaagctagaacaaaattgggtggaacgtctcctctttagggtttacaatgtgaaactgataatgtgagaagttccactggaggaaattagtacttggtcctaacttgggaccaataacagaatgatgcaaagtagctattcaggtttaagtatgtggaataacaggatatttgtttcagaaagttgaaaaactatagcaactgagaaagatggtggcttacctcttcatattgtcataaatatctaccagaatagaatggaaacaataaaaacaaaaaaggtttaagaataagaaaacaaagctgttactaaaatcaataatataggaagctttatagaattttgcaacagaatattacaaccaatgcatgtgtgaaaagcttcttcttaggccttgtatctcaaagatattaacattgccgttttccttttttatgaacacttacaaacttgccattgaattcattgctgtgaattcaaccataacaatgtcaggtttccaaattctcaagatcatggaaaacaaccaacttggaaataataaagcatacactttagatttactttccaatgtttgacaattaaggattttcttaaaaagatttataacattattccttgatgtttattgggtaactttcatcattttcaaaatttcatgaattctgaaattagccttttaaatatagctattgggtatagatatggaattttcttggagagaaaaaatattttattacttcacttcccttattaaatgctatttttattgggaaaaaatgttttgttggctataaaatatatagtgtcaataattaaatagtatatgcattaaatcaacactagagtaattttccttaggaaatttgttcacaataaactaaacaactataattctattataaatactaatagggattaaaaaagacaaccaagttcttttgtgccagtaagactgagaaagctcttttgtccatgacagagtactgaataaaatttgatttttgacgtctggtttctggaggagagtgaggctatgactggcatgaaaatagttcaggaatattaccatcaagagttggggagaggctgacggcacaaaggtggcatgtgagtttgcaagagagttaaaaggagaaagatggaaggggttggggttgtagatgtgtagatgtgtaggttgtagatttctgagacctctgttcagttccattggtctatatatctgttttggtaccagtaccatgctgttttcgttactataggcttgtagtatagtttgaagtcaggtagcatgataccgccagctttgttctttttcttaggattgtcttggctacacgggaagacctaaaaccataaaaaccctagaagaaaacctaggcaataccattcaggacataggcatgggcaaagacttcatgactaaaacaccaaaagcaatggcaacaaaagctaatattgataaatgagatctaattaaactaaggagcttctgcacagcaaaagaaacttatcagagtgaataggcaaactacagtatgggagaaaatgtttgtaatctatccgtctgacaaagggctgatatccagaatctacaaggaacttaaacaaatttacaagaaaaaaaaaccatcaaaaagtgggtgaaagatatgaatagacacttctcaaaagaagacatttatgcagccaacaaacatgaacaaaagcccatcatcactggtcattagataaatgcaaatcaaaaccacaatgagatgctacctcatgccagttagaatggcgattgttaaaaagtcaggaaacaacagatgctggagagaatgtggagaaataggaatgcttttatactgttggtgggagtgtaaattagttcacccattgtggaagacagtatggcaattcctcaagtatctagaaccagaaataccctttgacccagcaatcccattactgggtatatacccaaaggattataaatcattctataaagacacatgcacacgtatgtttcttgttgcactgttcacaatagcaaagaattggaaccaacctaaatgcccatcaatgatagactggatgaagaaaatgtggcacatatacaccatggaatactatgctgccataaaaaaggatgagttcatgtcctttgcagggacatagatgaagctggaaaccatcattctcagcaaactaacacaggaacagaaaaccaaacaccacatgttctcactcataagtgggaggtgaacaatgagaacacatggacacaaggaggggaacatcacacactggagcctgtgggggttggggggctagaagagggatagcattaggagaaacacctaatatagatgatggattaatgggtgcagcaaaccaccatggcacgtgtatcactatgtaacaaaactgcacgttctgtacatgtatcccagaacttaaattattaaaaaaaatagataatagtagtgaaaaggagggacttggcttgtgtcatcacatttaggaagtttcaatgaatcagggagtgttttccttccacaagactgctctgcactggcaaatatccctgctggctttaaggactgcttgggatacattccaggtcacgattgtttttgtcatctgtcatataaagagctgagggttgtgagacaggggttcacctctgtcacccaggctggagtgcagtggtgtgatctcggctcacttcaacctcctcctcctgggttcaagccattctcctgcatcagcctccagagttgctgggattacatgcacctgccaccacgcccagctaacttttgtatttttagtagagatgggagtttcacctttttggccaggctggtctcgaactcctgacctcaagtgatctgcctgccttggcttcccaaaatgctgggattataggcatgagccactgcacccagcctattttctgttattataaatgcagggtaaaaatcattttttaaagctgcctgatacatctttttattctccattttcttggtatcacaaatgatactgcaatgaacatttttgtgcataattagttttttctacatattgcagaatatttacatagggcagttgcccataaatataattggtgggctaaaattaataaacattaaggtttaaggctcttgatagttatattttatgtttcttccttagcagttgcatgtctatcagcaatgctagtgtcctcttcacccacaatgacgctgtatatcatcattttaagaagttacttgctaattttgtattctctaaactaaagctaactctctaaacaaattcaagataaaacaacaaaaacaaaagtaatatcgtagtagaacctaatctttcttcagtgcgtgctgtggactaaatgctttatgtgaactcactctgtattccactgacctttttcaggtgaatattacattatgtctagtcaaaaaatgagtaaatagagaaacaggttatgcaactatcccaagtttaaattgctggtatgcatacttccaatttattaccaacctaccagtttgtattcatcctatttataaattaggacacttgtattctccccactgactaatgcacattccaatatttttttctttctctgtatatgcccctaccccttttttttctgctgtggtggactcctattccttctttagagatgagtcaccactctgtgaggtcttccttgtagtcatcaccttccttgagtaattctgtcaccttaatggttctgcagcgctgtcatacaggtaaaattacttttgggtatgcctttctttcctgctaaagaactgcctttgccagaacacagaaaatgtgccatgcaatgcaaggcctccttcctacctccattccctgggtggatgggcaccagcacaggaatgtttattgttggatgtggctgggctcaggccacttctctctctcctggacctgtcttacattcatggacaactacaatcaccatttctgttacttaaaatacttgtctccagcattctctccatcaaatcagaaattctagagcagaaattatttttaaaaagttctccaggtggtcttcatgtaacgtgagagagagctactctttgggaatcattgatctggtagcttagtctgaaaaactggtgctttggaatcactggcagccatgccgccatgctttgtagagaaagtgggctcatcagtttcatcaaaggccaatcattctgtctctctgcaagtacatatcagtaaaagggaagagaaaattaacaaaataataaaatgttagaaatgaatggagcatgatgatcataccaccaataatactaaaactaatgtttattgaccatattatgtaccagatgctgggccaattgctgtatgtgcattatctcttaatctaaagctgtgcttatgaagtaggggattattatcttcatttttcaaatggagattctaatatttagacattaactaatttcatcaaagcgacacagctagtaagtacgaaaccaggatttaaaataggcagcctgactggaatctgcatgattaaccctgatgtaaggggcatgggggagtttaggggaggaacttagtctaaccctacatctttcatgtttaaatagcaaaaagaagaaggcagaggactggtgtgatttaattaataaagtttatatatccatatacaagtaaaaaaatcatcttttcaagtttccatgaaacaaatgttcatgtaaatacagaatgggttcaatactgggccaaatataaaatactaaaaaaacagaaatcatgcaagccacatttactaataatagaataaaaattaactatttttaataatacaagtcagcaattttcccaaacccaagtaaatattaaataaaaggagaaatcataagtggaattatagatgatatgtaataccatgaccatggaagctatacattaaacactttgacatgcagccagatgaatacttcctacagcaaaatagggcaaaaactatcttaagagttttcttttttaacaagagggaattaaaatcaataatcataacactgaactatttcttctaagaagataaaaataaaaacaaagttaccttttggatgcattaggctgatgagcatgtgacccagccacatcctctgaatggaatggaatggaaatatgtgtggggcaatagctaaggcctaattatgacactgcagatttagattttttgtttctcttctatgtgtttaagtcatttccttatggaagtcacttaaatggatctgacacttacaaagccattattatctgctgtgttgtattctgtgttctttgaagtgattgcaaattggtagataaatcatgctggtagattccaggtttcaaatgtaggacaactcatctataattattaaaatctcctagcaatttcatctctaaaactgccataaatggtatatatatatatatatatatatatgttaatctatgtatatttatttgagagtgtgtatatacacacacacacacacacacacacacacacacactgccttcataccatagacacaggatgctctataatgcatattttgtttattcttagattaattaattttcttctctcttccatgaaatgctattatggcatttttaatcacaactgcaattatcttaagaaccgtaccaaaggagtgtcaggcattagtaatttcattaattttagtcattatgccaaaatacattaatttaaaactcatatactcaaataatcaaaataatgcctttttcactacttttcaatgtttttctccagctctagttttttctatttttatcattgctagtaatacccttttcctttgcacatctgtgatgagcttttatgataatagaagttaatttttttctgcctttttagagtattgcattagcagtactcttctttcagggaaacaaaattctcatggtcgtttacttgtgctttaaaatgatttaatgatatttaaatgaatgtttatattttctaccttgcattagagttatatgtgtatgttaactgttttatcttcactcaaagtgtgagcacctgagagaagttttatactttggtattctccctggcatatattacatctatgtccacatacatatattccagtactttgcacatgttagctgctcaatttgcatacattaaatgaagaaaaaaatggtgacttttgtcttttgcaggcaactttcccattctcatttttgctttctttgagctgttttcctgtaacacacctaattcagccaccactgtggaaagtgttctttatctgatctgattgctcaatatcagaagggttacaaagattattccacaatgaaacctaagttgttgtttatgtatttaaattaaatttggatcccactactaggaatctactcaaaggaaaagaaatgaatttctctaagggctacctgcatttgcaggtttattgcagcactattcacaataacaaagatagcaaatcaacctaaatgcccatcaatggattaatggttaaagtgtggtacatatacaatatggaatactatttggctagtatagtatgaaattctatcatctgcagcaacatgggtggaactggtggtcattgtgttaagtaaaacaacccaggcagagaaagacaaatttcacaggttctcactcatgtgggagataagaaatttgatcacaaggaagtagagagtggaaagagagagaacagagactgggaagggtgagtgggatggctaaagagatgtgacgagtacaaacatagttattcggttggagaaaagtaatggcaaaaaccgcaattacttttgcatcaacctaatagaaggaatgaattttatgtttcatagcagattagggtgcctgtagttagacaaaagcatattttactcaggtgatgaacaccctaagtacccttaatcactatgcattatatacatctaacaaaatttcacaagtactgcatacatttgtaaagataaaaaatattttaaatgaaactttgaactttgcaaaaaaagaaaagggttgcacaaataatcatatagtttcctcaacaattaggttaaacttctctcttgtcttttctcttcacccccaacccatacttgagagattttataaatgattcatatagtttaatatttatctgtgatcttctggaaaggctaagctgtggattatgactactttagccttaggagctctcctttgattttaaagtatcttcttacccatcaaagtggccacaagctagttacagttgcagtaagcaaaattgccctaaaaaaagaaagaatggactttcttagtccatttgtgttgctataaaggaatacctgagtttgggaagtttttaaagaaaagaggttttttgtttttgtttttttttttttttttttttcccccccaaacttttaatttaaaaaaattttttttttttttaaaggttttttttttaaaaaaacccaaattttaagggtacatttccacattgtccaggttattaacatatttaaacatttcccagccgggggtgccccccccacaaacttttaattaaccataaggtatatcccccaatgctatcccccccccctccccaaaccccacaaaattcccaaaattttaatatccccctcccaatttccatttaatcccatggttcaatcccccccaaaaattaaaaatacccggtgttgggtttccggttctcgcaaaattttacggaaaataagggtttccaatttcacccatttcccaaaaaaggaacaaaaactcatccttttttagggcgccatattatcccagggtgt

SEQ ID NO: 28209 - DNA, 3336 bp, Homo Sapiens
ggcggcggtgaccccggcctggaactgccccggtacggaagtgttccggggtccgtggggagcaggagagggaggcggcggaccgtcccgcgcggggcacgatgttgaacatgtggaaggtgcgcgagctggtggacaaagccaccaatgttgttatgaattattcagagatcgagtctaaggttcgagaggcaacgaacgatgatccttggggaccttctgggcaactcatgggagagattgccaaggctacatttatgtatgaacaatttccagaacttatgaacatgctttggtcacgaatgttaaaagacaacaaaaagaattggagaagagtttataagtcgttgctgctcctagcttacctcataaggaatggatcagagcgtgttgttacaagtgccagagaacacatttatgatttacgatccctggaaaattaccactttgtagatgagcatggtaaggatcaaggtataaatattcgacagaaggtgaaggaattggttgaatttgcccaggatgacgacaggcttcgtgaagagcgaaagaaagcaaagaagaacaaagacaagtatgttggggtttcctcagacagtgttggaggattcagatacagtgaaagatatgatcctgagcccaaatcaaaatgggatgaggagtgggataaaaacaagagtgcttttccattcagtgataaattaggtgagctgagtgataaaattggaagcacaattgatgacaccatcagcaagttccggaggaaagatagagaagactctccagaaagatgcagcgacagcgatgaggaaaagaaagcgagaagaggcagatctcccaaaggtgaattcaaagatgaagaggagactgtgacgacaaagcatattcatatcacacaggccacagagaccaccacaaccagacacaagcgcacagcaaatccttccaaaaccattgatcttggagcagcagcacattacacaggggacaaagcaagtccagatcagaatgcttcaacccacacacctcagtcttcagttaagacttcagtgcctagcagcaagtcatctggtgaccttgttgatctgtttgatggcaccagccagtcaacaggaggatcagctgatttattcggaggatttgctgactttggctcagctgctgcatcaggcagtttcccttcccaagtaacagcaacaagtgggaatggagactttggtgactggagtgccttcaaccaagccccatcaggccctgttgcttccagtggcgagttctttggcagtgcctcacagccagcggtagaacttgttagtggctcacaatcagctctaggcccacctcctgctgcctcaaattcttcagacctgtttgatcttatgggctcgtcccaggcaaccatgacatcttcccagagtatgaatttctctatgatgagcactaacactgtgggacttggtttgcctatgtcaagatcacagaatacagatatggtccagaaatcagtcagcaaaaccttgccctctacttggtctgaccccagtgtaaacatcagcctagacaacttactacctggtatgcagccttccaaaccccagcagccatcactgaatacaatgattcagcaacagaatatgcagcagcctatgaatgtgatgactcaaagttttggagctgtgaacctcagttctccatcgaacatgcttcctgtccggccccaaactaatgctttgatagggggacccatgcctatgagcatgcccaatgtgatgactggcaccatgggaatggcccctcttggaaatactccgatgatgaaccagagcatgatgggcatgaacatgaacatagggatgtccgctgctgggatgggcttgacaggcacaatgggaatgggcatgcccaacatagccatgacttctggaactgtgcaacccaagcaagatgcctttgcaaatttcgccaattttagcaaataagagattgtaaaagaagcagattgaatgaagaatttttagctgtgcagataggtgatgttgggatggaaaatgctaatcaactaccctttcttttatcaagtaattaaaataaatctacataaagaaccaaaaaggctgttttataaaagtgaaatatccagtatttcagagggccaggcaagagcacttcagatgaggcagtcaaaatcatttttttccagtgaggatagaccacaagtgggtggtgagaccattgaaagcctttatcaactgaagagtccatttaacagcataatttgtgggaagactggaatagggctgaataaatgtgtttgaatctctaattttatactttcttttcctgaggaacttgatttttctgtccctggatcgccttgtcataattgggtctgttccttttactaccactcttgagtccatatatgaaatcattaaagttggatgatcagttttttataaaaatatatatttttgtccaagaaaaaaaaaagcatacatatgtgattatggctaaatcaaaggtaactggaatgtatatacttttgctaatgttccagcaacactgctattatactatccaaatttttattgtaacaaaacctctttaagcaattggtgattgccatgggacttttcccatgtcttctgctgtaattatcctgtgcagaactaggaagaaatttttttcaggactgctctatggtttcctttaaaagaaaaaaacttctgtttgtttttagcagtcattatttacaatttgcagtgattaacttggcaaggcttccttccgtgtttatccctgtagccatcatttaagtcaggaacagtcagaaaaatatttattttattttttttttgggtgtctgcaaaggtaaaaatccattaaaaccttaagttaaatataaatgttacaactcaatgtttgcttttagattttatacagtatttgttttgttttggttttgagtgtatataatgcagcattagcaatatggttccaatagaggagttaaatatatattgttaaaggagacctgtagcagtcaaagattttattgatttaatgacaaaggaaattaatgaaaatgtttttgtttttctgctgtaattctgcattaagctcacatgaaaatcatgattctagagtttggaatgcaaaattaattgttttaccctcaagctgggaatatttttcaaaataaatactataatatagatatcaaattattacctccccatgttatgttgaaaatttttttattaaattgataaaactttatttccattatattcataatgttctgttatacataacattaaaatgttcattaaaatc

SEQ ID NO: 28210 - DNA, 421987 bp, Homo Sapiens
gaattcattgaaatgcccattttccctctcttctgagtttgtatttctctcactgtaagagatggttatgtcaccgtgtacatgtatccctaaaagttcaccatttcccccttccatcattatcattacaaatttaatttcaattctccctaataacaatgggccaatatttgcagtacaatggctaatctttacttcggtcctggaaatcagagccccagtaggctaagagcaaaagggtcagataaagacaactgaaaaacagactttattcacttctttcttttcatcctcattagcactctcaaccaccttccagcatcttttctggagaattttccctccagagattcatatcaaaagtaagcttattacacaaatctgagaggaaataggattggggtaaaaagtctggtcttacactctggcgtctatttctggcctcaacaaatgcatctttggtcaagtagaatgtgaaatgtaataacttggttacaacctcaaagatataaatgagtcattgagatattttatggtatgttttatttggagaatggcctttctggaaaagaccagcaaaatgtgttttttttttttccataggacacaagacttcctaaaatgatcattatcatgaagaacaatttgttatttctatttttatttattttagagacagggtctcactctatggcacaggctggagtgcaagtggtgcaatcatagcacatagcagtcttgaacccctggactcaggtgatcctcctgcctcagcctcccaagtagctaagacttcaggggctcaccaccatgtctggctaattcttacatttttattttttgtagagactgggtcttgctctgttgcccaggctgatctcaaactcctgggctcgagcagttcctcctgccttggccctctcaaagtgctggcattacaggcatgagccactgctcctggctgcctgctttttgttgttgttgttgttttgttttgttaatgagatagcacatatactgagaggaaaaacttcaaatagaacaaggagttcctttctactccacatcctaagccagttacatctgaaaattacctctatcatgggttttctacttattcttgcagaagttttatacatttatatatgtctatacattttagtagttatttttctaattcctttgctttacacaaagggaggaatgtgacttgttctatatctttttgtaacatctatcttatttattttaaaaagccacgtagtctttcctattgttacacatttgggttgcctattttttctcgatacaaattacacttcaacatcttgcatatacatcttttcagctttgtgaatgcatgtccatgggataaattcctaaaagtggaatttctggatgagaaactttgtgtatgcttaactttaatggatattgctaaattgccctccacagagtaatatttctcaatttgtactctcactaacagtggatgggagtatgcctttccccatattcttattaacattattgtattatccaacttgttaaacctttttaataatctgatatgtgacaaatggtatctcctttgtgtgttttttgtgtttcaatatacatatctttgtaaataaggttgagaataattttatgtgtttataatccatttacatttacttttctatgaaacgcctatttatatattttgctatttttttatttttgtagcttgtccttttgttattgactcttaagaattcttcaatgctaagaaaatttgtgttttgcctgaaatgttttcttgtaatttgccagttgtctttcgactttgtttagaatatttcttgctgtacagaaagcttcattttctttgatatatagctacatttcagtattttctgttctgcctttttttgtatgtcagttaaaaaattcttcattacaccaaaattattgtataaatgttcacattttccttgaatattttattgttttctttttcatttatttctgacagtttagaagttggtaggcactcagctatatttttccacaaatggaaagccagttgttccaataccaaattagtaaataatctatttttataaaatgatttgaaatgtcatctttagtagatatcaaattcccatattattctgattctagctgtagactgtgctttcttctagtggcagtacagagtaggcaaacctccgcaagttaaaatgtgccaaaatatcggtcccctcagccccttggacagctaagctggtcctcaggtaacccaggccttaagcaattgcctctacacgtgaccttgattgatttcccagcatgccataaaaatattttcattttctatgtgtaccacaacatgaagaaggttgagaagcactggtgtttgtttgtaggtatacgggattaaattatctctgcacaaaaagctatctaggttcaaatctaggacctatctttactggttgtgtgaccttgggtgaattattaatttaccttgctgaaaagggaattaaagaaatttgttcttgctattgtttatctttccttgggaatgaatattggattttatcaaatgccttttcaccatgtatgaaaatactcactttttaaccatttagcctattaaatatataaattaaatcaatatatttcttaatattgaaccattagttcattcctgacaggaccttaacttagtatatattattatttgaaattactaatagatgctattacctaatttctttaggattttgtattgatattcacaaattacatttattaataattttctttttctgtactacatttatcacattttggaataattgctttctggcatcatagataatatttggaaaccttccttctttatgcattgaagcagttgaaatagcattgagattatttgttccttggaggtttgaatgataccatctgtgaagatgtctgggcttgatacttcttagtaggtcactaagaagccagcatcatcctgataccaaaacctgacagagacacacacaaaaaaagaaaaattcaggccaatatccctgatgagcactgagaagaaaatcgttgtgaaattcctcatttataacttcaaataatgccacatttccagttaatttaagggagattttacaatgacattactagtgaattatctttgctgacatttggactccccaaagtcccacttgattcatagtctttatttccaacatgatccatacaacaagttttaaaacttctgttttaaaggcatagacacgtaacagagaaatatgagaaaggggtatttccagatgctgaccctaaaatgtaccttattctgtgagccagagtctagtaaattctacttttgcacattcttcatagattctcaagcttttaactaggatttataatcttaaaatggatgattcaaattactaaaataaactaaatttcttatttattctggactgcctaagattagctaaatttctggctttggatttatagcctttggtccctgaaaaacacatgtatttttggatatcaccattgaaagattattcacaaactttggattttgttatctttgtaaagataattttaaaattaaataagtatgatagaatattaaatttgatatttcttggattttttgttttggggtttctatttttttgtttcagcagacatcccaaaatctgaaaacaatagaagtgccatatatatatatacacatatatgtgtgcatgtacacatatatgtatgtatatatgtatatacatgcatgtatatcattacgcatacatatatacatacatgcgtgtatatatgtatatgtatgacatctgttgttttatatataaatatatatatgatgtgtgtatatatgtatatgtatgacatctgttgttttatatataaatatatatatgatgtgtgtgtgtgtatacacacattctaaatcaaagtgcctgattgctttttcattcattcattcatatgttgaacatatatctattgacagcctactatgtgtcaggcttttctctaaaaccaaatgacacagaaataatcaaaacacataaaaaatgtctgctttattgctgcttacattccagtggatatttgaagactatcattcgcctccagactaagagatagctaaatatccactgaaagggtgaagaggctgctaatgaggatttttttttggagactattgtcagagcattataaattatctctctcttacatgggagggaaaggaaactcccctttcatctcaaatcaattgaagggggcctcaaaagaaccatttgggaggctaatatgcattctctggaatttcagagacatgagagcaagttacttgacccatggctgaacaaaaaagcaaaggtaagtgtacctagagctgcctatagaagaataagaagcctcttgtcagtagtaagttacaagttcattgaaagcagggcagaggggtcgattttccatagatcacatacaactctgcggaatggtgctgcctgatagtcaagttgattagctggccataagtgccaccaaaagcttctgctaagggtgaggcagcctcagcaacaagaagataaaggtgtgtcatagatgcagaagagatatgaaggggtgaaattgaccatgtggaagcagcatcactcattccaggaactgcaggtgaagatctccaaggagggaatcatcaaactgaagggggaaataaaaataagccttgaattccaccatgcccagatggcatcaacaccatattacaactttacaagttcaaaagcacatttctgccccttattcttctttccctactctaatattccctagtattaaaggagcccaaaacagcaactgttaagtggagaatgcagtgaagcaaaaaaaaaaaaaaaaatcagatcataagaacccctgtctaccccaccttctcagtcgatggagcctgaggccaacctaaactagggaagaagagaactcttaaactaaatgagatttgggacttttgataagcatttgtgctgtatattcattatttaatgagacagaggagtcttcggacctgactgagattttattccaggggctagaaacaactgatccaaagaacaagtgaaaaagaataaattaaaggtgcattctgcttcactctactaagtacagttcatccaataaaccaattaaataagtttagcttttcataagtagaaagaaacacaaacctttaagttagacttcctgggagaacaaggtaacataatgtggaatcttttgatataaaaagtgaagctacaaagcctcctgaatcaatttctaaataacctatggcaataggatattagagataaacagaaaaataataacatatctccactatgggcatcttttccaggttttataaaatatctctgattatttctgttatcgaattttatgattgggaacttatgagtgggacccatagagctctgaggggagtaattgtttttatttttttcaaaagcttaatttgagtatgatgcctgtaacaggttcaacagtggtagaataaagtttctaccacttgcacaacagaatacaaagatcatccaaaatagaagataaatgagtcagatattaaatacagtggattttttcagatcagcatgccctcgtagcatagttccagggttaatatatatcctgaacttattatagaaataatctttccaggtgcatgttggacaatgatgaagcctaaagctgaaaaatgatatgcgtaagacctacctctaaaaatgaaaataacgtaatagcccaaaaatattatagtctggtcaccttaactttgatacctgaaaagaccaaactcattaatcatttcatttataaaatgctaaatgatcacaagtgccagagagtagtcagtgggattttaggaagaataaatcagtcagacctatgtaatattgttccatgacagactgccaggcattattgattggaagggaaggaaaaaagactttaatcctggtcttaaaggacctaatcataaataaatttaggaagatattttcaaagtgcatcactacaagaattctcaacttcttagaaggcagaacagatggtatttcattctcctcttttctttcctaaagcaaaaacaagagcgtgattaagccttagttaaacatatacaaacagagaaaaaacaaaggaaagaaagaaatcctttaccaaattgttgtaaattgagagggtgtcattcacattgcaagtggagaaaacatgctataaatagctttgcaggaggatttattttatgctacattagcacaaaaaaagtcaaaagctagggaatgtggctccccccaaaaagagatgagaaaggttcaggagacaaaaatcgatttcaagacaaaagctacaaaaatagacaaaaaaaagtcattatataatgatataggagtcaattcagcaagagaacataacaactgtaaatatatatgcacctaacactagagcacccagatatataaagaaaatattattagagctaaagagagagatgggccccaatacaataataactgaagagttcaacatcccactttcagcactgggcaggttatctagatggaaaatcaacaaagaaacgttggatttaatgtgcattatagatcaaatatacctaatagatatttacagaacatttcatgctatgattgcagaatacacattcttctcctcagtacatggataattctcaaggataggccacaagttaggccacaaatcaagtctttaaagtttcaaaaataattgaaaacatatcatattagtttgttctcacactgctataatgaactacttgaaactgggtaattcatgaagaaaataagtttaattgactcacagttctacaggctatacagaagcatggttgggagacctcaggcaactgacagtcatggcagaaggtgaaggggaagcacgcaagcacatcttaccatggtggagcagtaaagaaagataatgaagggagaagtgccacacactttcaaacagccagatctcatgaaaactagctcgctatcatgagaaaacaacataacacatatcttcttggaccacaatggaattaaactaaaaataaataaaaagaggagctttggaaactatatgaacacatggaaattaaacaatatgctcctaaatgaccagtgggtcaatgaagaaattaaaaagaaaatttaagcagtgagctgagattacgccactgcactccagcctggaggacacagcaagactctgttctagaaaataatcccctttacaatagctacaaataaaataaaatacataagaataaatttattcaaagaaatgaaagattactacaataaaaactataggctgggtacaatggctcattcctgtaatcccaccattttgagaggtcaagataggaggattgcttgagcccaggagttcaatacaagcctggacaacatagtgagatcccatctctacaacaaataaataaatttctttaaacttttaaaccttttttaaaaaaaaccatagagtgccaagatggccaaataggaacagctctggtctttagctcccagcgtgatcaacgcagaagatgggtaatttctgcatttccaagtgagatacttggtttatctcactgggactggttggacagtaggtgcagcccatggagggcaagccgaagcagggaggggcatcacttcaccgggaagagcaaggggttggggtatttccctttcctagccaagggaagtcatgacagactgtacatggaaaaacaggacattcccacctaaatattgcatttttccaatgatcttagcaaacagcacatcaggagattatatcccgcgcctgactcagagggtcccatgcccatggagccttgctcactgctagcacagcagtctgagatccaccagagaggcagcagcctggcagggggaggggcgtccaccattgctgaggcttgagtaggtaaacaaagcagccagggaagctcaaagtgggcggagcccaccgtggctcagcaaggtctactgcctctgttgactccacctctaggagcagggcatagctcaacaaaaggcagcagaaacttctgcagacttaaatgtccctgtctgactgctctgaagagagcggtggttctccaagcatggagtttgagttctgagaacagacagactgcctgctcaagtgggtccctgacccccgtgtagcctaactgggagacacctcccagtaggggctggctgacacctcagaaaggtgggtgcccctctgggacgaagcttccataggaaggatcaggcagcaacatttgctcttctgcaatatttgctgttctgcagcctctgctggtgatacccaggaaaacggggtctaaagtggacctctggcgaactccaacagacctgcagctgaaggatccgctagaaggaaaactaacaaacagaaaggaatagcaccaacattaacaaaaaggacatccacactaaaaccccacctccagttcaccaatatcaaagaccaaaggtagataaaaccacaaagatggggagaaacgagagcagaaaagctgaaaagtccaaagaacagagcatctcctctcctttaaaggattgcagctcctcgccagcaatggaacaaagctggatggagaatgacttggatgagttgacagaagtaggcttcagaaggtcggtaataacaaacttctccaagctaaaggaggatgtttgaacccattgcaaggaagctaaaaaccttgaaaaaatattagatgaatggcaactagaataaacagtgtagcaaagaccttaaatgacctgctggagctgaaagccatggcacaagaactatgtgacacatacacaagcttcagtagccaattcgatcaagtggaagaaagggtgtcagtgattgaagatcgaattaatgaaataaagcaagaagagaagtttagagaaaaaaagtaaaagaaatcaacaaagcctccaagaaatatgggactatgtgaaaagaccaaatctacgtttgattggtgtacctgaaagtgactgggagaatggaaccaagttggaaaacactctgcagggtattatccaggagaacttccccaacctagcaaggcaggccaacattcaaattcaggaaatacagagaacaccacaaaggtactccttgagaagagcaaccccaagacacataattgtcagattcaccaaggttgaaatgaaggaacaaatattaagggcagccaaagagaaaggttgggttacccacaaacggaagcccatcagactaacagcagatctctttgcagaaatcctacaagccagaagagagtaggggccaatattcaacattgtgaaagaattgtcaacccagaatttcatatccagccaaactaagcttcataagtgaaggagaaataaaatcctttacagacaagcaaatgctgagagattttgtcaccaccaggcctcccttacaagagctcctgaaggaagcactaaacatggaaaggaacaatgggtaccagccactgcaaaaacatgccaaattgtaaagactatcgatgctaggaagaaactacatcaactaaccggtaaaataaccagctaacatcataatgtcaggatcaaattaacacataacaatatcaaccttaaatgtaaatgggctaaatgtcccaattaaaagacacagaaccaacccaaatgtccatcaatgacagactagataaagaaaatgtggcacatatacactatggaatactatgcagccataagaaaggatgagttcatgtcccttacagggacatggatgaagctggaaaccatcattctcagcaaactatcacaaggacagaaaatcaaacaccccatgttctcactcataggtgggaattgaacaatgagaagacttggacacaggaaggggaacatcacacaccggggcctgtcatagggtggggggatgggggagggatagcattaggagaaatacctaatgtaaatgacgagttgatgggtgcagcaaaccaacatggcacatgtatacttatgtaacaaacctgcacgttgcgcacatgtaccctagaacttaaagtataataataaaaaaacaataaaacattgatgtaagaaattaaagaggacacaagaaataaaataattccatattcatatattcaaaaaatcaatttttttatttcaatagttttggggatataggtggattttggttacatggatgagttcttggtggtgaattctggaatttgtaatgcacccatcatctaagcagtgtacagcatacctaatatgttgtcttttatccctcatcctcctcccaacctctcccaccccaagtcctcaaagttcattatatcactctgtatgtttttgcatcctcatagcttagctcccacttacaagtgaaaacatatggtatttggttttccattcctgagttacatcacttaaaataacgacctctagctctatccacgttgttgcaagacattattttgttccttttaatggctgagtagtatttcctgatgtatatataccacactttctttatccaaccattggtcaataggcaggttagttccatatccttacaactgtgaactgtaccgctacaaatatgcatgtgcatgtgtctttttcatatactaatttcttttcctttgggtagatacctagcagtgggattgctggattaaatgatagatctatgttaagttctttaaggaatctccatgtttttcatagtgattgcactaatttacattcccaccagcagcgtaaatgtgctcccttttcaccacatccgtactaatatctattgttttttgactttttaattatggccattcatgcaggagtaaggtagtatcatgtggttttaatttgcatttccctgatgattagtaaagttgagcattttttcatgtttgttggctgtttgtacatctttttttttcttgctgatttgtttgagttccttgtagattctggatactagttgtttgttggatgcatagtttgtgaatattttctcccactctgtaggttttctgtttattctgctaattacttctttggctgtgcaaaagcattttagtttaaccaggtcccattgatttatttttgtttttattgcatttgttttgggggccttagtaatgaattgtttgcctaagccaatgtccagaagagtttttccaatgttatcttctagaatttttatgatttcaggtcttagatttaagtcttcgatgcatcttgagttgatttttgtatatggtgagagatgaggatccagtttcattcttctacatgtggcttgccagttttcccagcaccatttattgaataggattgtcctttcccctagtttacgtttttgtgtgttttgtcaaggatcagttggttgtaagtattttggcattatttctgggttctctattctgtttaagtgcctatttttataccagtaccatgctgttttggtagccacaggcttgtagtacagtttgaagtttgtaatgtgatgcctccatgtttattaatttttcttagtattgcttttgctatgtgggctcttttttggtttcatatggattttaggattgtttttcctaggtctgtgaaaaattatgatggtattttgatgagaattgcattgaatcttagattgctttggatggtatggtcattttcacaatattgattctttccatccatgaggatgggatgtatttacatttgtttgcatcatttatgatttcttttggcagtgctttgtagttttccttgtagagagctttcactccttgggttaagtatattccttgggggttttttgttgttgttgttgttgttattgttgttgttgctgctgctgctgtttttgcagctgttgcgaaagggattgagttcttgatttgattcttagcttagtcgttgttggtgtatagcagtgctactgatttgtatacgctgattttgtaatctgaaagtttgctgctagtagccttttggatgagtctttggggttttctagatatacaaccatatcactggcgaacagtgagagcttaactccctcttttccagtttgaatgctctttgtttctttctcttgtcctgttgctctggctaggacttccagtactacgttgaatagaaatggtgaaagaggtcatccttgtcttgttctagttctcaggggtaatgctttcaacctttcccccattcagtacgacgttggctgtgggtttgtcatatgtggcttttattactttgaggtgagtccctcctgtacttattttgttgagggattttatcataaagggatgctggattttatcaaatgcttttttctgtatctatttaaatggtcatatggtttttgtttttaattctgcttatgtggtatatcacatttattgacttacatatgttaaacaacccctgaatctctgggatgaaaccctgctgatcatgatgtattattttttttgatgtgctgttggattcatccagctagcattttgttgaggatttctgcatctatgtccatcagggatattggtctgtagttttccttttttgttatgttctttcctggttttggtactagggtgatatttcctttatagaattattttgaaagaacttcctctttctatatcttttggaatagtttcagtatgattggtaccaattctttgaatgtctgatagaattcggttgtgaatccatctagccttgggcttctttttgttggcaaattgtttgttagtgattcaacctcactcttgttgttggtttgttcagggtttctatttcttcctaatttgatctaggagggttgtatgtttccaggaatttatccatttcctctagattttctgctttgtgtgcataaaggagtttatagtagccttgaatgatcttgtgaatttctgtggtattggttgtaatatctccagtttcatttctaattgagcttatttggattgcatcctttctttttgtggttaatcttgccagtggtctatcaattttgtttctcttttcaaagaaccagcttttgtttcatttatcttttgtatttttttaatgatttcatttagttttgctctaatcttggttattttgttcttcctctggctttgggtttagctttttcttgtttctctagttccttgaggagtgatattcagttgtcaatttatgctctttaagactttttgatgtaggtgtttaatgctatgagctttcctcttagcattgcttttgctgtatcacagatgttttgataacttgtgtcaatattatcattgatttcaaataattaaaaaaaatttttttttgacagagtcttgctctgtcaccaggctggagtgcagtggcatgatctcggctcactgcaacctctgcctcccgagttcaagcaattctcctgcctcagcctctggagtagctgggactacaggcacacaccaccacacctggctaattttttgtatttttagtagagatggggtttcaccaagctggccaggctggtctcgatctcctgacctcatgatcctcccacctcggcctccaaaagtgctgggattacaggcgtgagccaccgtgcctggccaatttttaaattttcatcttggtttccttgctaacccaaaaatcattcaagagcagagtatttaatttccatgtatctttatagttttgaggactccttttagagttgattttcagtttgaatctactgtgatctaagaagatacttgatacgatttcaattttcttaaattgattgagacttgttttgtggcctatcatatgatctatcttggagaatgttgatgtgctgatgagaaaaatgtatatcctaccactgttggaaagaatgttctacaactatctattaattccatttgttctggggtattgtttaagttcattgtttctttgttgactttctctcttgattatcagtctagtgctgtcagtggagtattgaagtccccagctattattgtgttgctgtctatccgatttcttaggtctagtagtaattgttctataaatctgggagctccagtattagatgcatataaatttaggattgtaataacttcttgttggactgatccttttatcattatataatgtccttctttgtcttttttttttttttactgttgctgctttaaagtccattttgtctgatataagaatagctgcgcttgctcatttttggtttccatttacatggaatatctttttccacccctttaacttgagtttatatgaatctttacgtgtcaggtgagtctcctgaagacagaagatatttggttgttgtttttttttctattcattctgccattctgtatcttttaagtggattatttaagccatttacattcaatgttaatattaagatgtgaggtactattctattcatcatactagttgttacctagatactttgttttttttcattgtgttattgttttatagactttatgagttgtatgctttcagaaggttctattttggtgtatatctagcttttgtgtcaagatttagaactttttttgcatttcttgtagttctggtttggtaattacaaatttcctcaacatttgtttctctgaaaaagacttttatttcttcttcattagtgaagctttcctggatacaacagtcttagccgagaattattctgtttaaggaggctacagataggacccaatcccatctagcttgtaaggtttctgctgaagtctgatgttagtctgataggtttatctttataggttacctgatgcttttatctcacagttctttgaattctttccttcatgttgactttaggtaacctgatgattatgtgccttggtagttatctttttgtaatgaatttcccaggacttctttaagctttttgtgtttggatatataaatctctagcaaggtccatactacctagtagtatctataggctcaatgcaatattcatcaaaataccaatgatattctgcacagaagtaggaaaaaaaccttaaaatttatatggaactacaaaatacacagaataaccacagacatctttgagggaaaaaaaatgaaactggagaaatcacattatctgccttcaaattatactacagagctataagaacaaaaacatcattgtactggtgcaaaaataggcacaaagaccaatggtatggaagaaaataacccataaataaatccacaaatctggggtaaactcagtcttgacaaaagtgccaggagcatacattggagaatggagaatatcttcaataaatggtgctgagaaaactggatgtccataggcagaagaatgaaactagacagctatctcttgctgtatacaaaaatcaaatcaaaatggatcaaagacttaaatagaagacctcaaactaagaaaccactaaaataaacattgaggaaactctccaggacattggcctgggctgagatttcttgagtaataccccacaagcacaggcaaccaatgaaaaaatggacaaatgtaatcacaataacttaaaaagcttttgcacagcaaaagagacaatcaacaaagtgaagatacaacctacagaatgggagaaaatatttgtaaactatcaatctgtcaagggattaataacccagtaagaaaaattaataactcaataggaaaaaaatctaaaaatccaatgaaaaaataggcaaaaaatctgaatagacatttctcaaaagctgtacaaacggcaaacaggtatatgaaaatgtgctcaacattattgatcaccagagaaatgcaagtcaaactgtaatgtgatatcatttcaccccagttacaacggtttttatctgtgagatatctgcactcccatgtttattttagaactattcacaatagccaagatttggaaagacctaagtgtctatcaacagagaaatgattaaagaaaatgtggtacagatacacattggtgtactattcaggcataaaaaagaatgagatcctgtcatttgcaacaacatgaatggaactggaagatatcatgttacatgaaatgagccaggaacataaagacaaacttcacatattctcattcatttgtgggagctaaaaattaaaaacaatggaactcatggacaaagagagtaagtggatggttactagaggctgggaagattagtagcaagggggagaagagaggatggttaatgggtacaaaaatatagttagatagaatgaataagatctagtatttgatatcacaacagagtgactatggtcaaaaataattaatagtacatttaaaaataactaaaagagtataactggaatgtttgtaacacaaagaaatgataaatgcttcaggatggatggataccccatttaccttgatatgattattatacacattgtatgcctgtatcaaagtatctcatgtataccataaatatatacacatatattatgtactcataaaactaaaaataaaaataggttgggtgtggtggctcttgcctgtaatttcagcagttttggaggccaagacaggtggatagcctgaggtcagaagttcgagaccagcctggccaacatggagaaaccccatctatactaaaaatacaaaattaactaggcatggtggcgcatggctgtagtaatccaagctacttgggaggctgaggcaggagaatcacttgaacctgggaggcaaaggttgcaatgagccaagatcgtgccatttcactccagcctgggcaacaagagcaaaactctgtttcaaaaaataaaaataacaaaacaaattgcaaagaaagaaaataagctctagcagaaggatgcccatgggcaccccactatcatgccaccactagcacaaacatgtatgcagatgccaccaccccactcccatcagtgtcccatcacaaccaacacatgtgcaccctgcacactgccacagctgctggcacacattcccacaccccttcaaaacactttgcttggcacctcccatcagactgttggagccaatagagaagaaccacctcagccacttcagcacaacagatttctaacctcaaggggccagagaacaaagctgtggggccagtatcagccccccagggacagagcacacaacccatgagttctcagataagccttggctccctgaaatcttccagaatccacgccagttgactgaacttaccttacaccacaatcaaactcccaagctaagatcacgctactgcactccaacctgggcaacagagacagaccctgtctcaaaaaataaaaaataaataaaagaacatcaacccacacaaataagaaagaaccagtgcaagaactctggcaactgaaaaagccagagggtctttttacctccaaacaactgcactagattcccagcaattattgttaaccaagctgaaatggctgaaatgacacagaatttagaatatgaatagcagtgaagatcatcgatattcatgagagagctgaaacccaatccaaggaatctaaggaatataataaaacaaaaagggagctgaacaacaaaatggtcattgtaagaaagatccaaactcatctaatagagctgaaaaggcacactacaagaatttcataatacaactgcaagtattaacagcagtatagaccaaattgagaaaagaatctcagagtttgaagattggttcaccaaattaactcaatcagacataaataaagaaaaaagaataaacacaatgtgtgattaagtatatagaccaaacatacgactcactgatatccctgaaagacagggagagaaggcaaaaacttggaaacatatttgagaatatcttccatgaaaatttctccaaccttgctagaaaggccaatagtcaaattcaggacatgcagagaacccctgcaagatactatacaagacaaccatcctgaagacacatggtcatcagattctccaatgtcagagaaaaaaatattaatcaactagagaaaagaagcaggtcacctacaaagcgaactccatcaggctaacagggtactttgtagcagaaaccctacaggtcaaaagagattgagggcatgtattaagcattcttaaagaaaaagactccaaccaagaattacatatccagacaaactaagctttttaagtgaaggagaaataaaatcctttcagacaaacaaatgctagaggaattcataatcaccagacttgccttacaagaggttctgaagggagtgcaaaatatggaaacaaaggactgttaccagccaccaccaaaaaaaacacttaagtacatagaccactgacaatataaaaccatcacacactcaagtctgcagaataaccagctaacagcacaatgacaagatcagatccgcacatatccacattaaccttgaatgtaaatgagataaatttcccaattaacagacacagtgtagcaagttggataaagaagcaagacccaactgtatgctgttttcaagagacccgtttcatatgcaataacacctatgggcttaaagtaaagagatgaagaaaaatctaccaaacaaacaagcaaaagagtaggggttgttatttctaatttcagacaaaacagacgttaaagcaacaatgattaaaaaaaaaaaaaggccattacagaatggtaaaggtttcagtacaaccaaaagccctaaataatctaaatatatatgcacccaacacagaagcacccagattcataaaggaagttcttagagactttcaaagatacttacactcccacacaataacagtggaggtgtcaaaaccccactgacagtattagacagataattgaggcagaaaattaacaaagatagtcaggatcggaactcagcactggatttaatatacctgacagacatctacagaactcttcacccaaaaataacagaatatacattcttttcattgccaaatggcacatactcaaaaactgaccacacaactagccataaaacaatcttcagcacattcaaataaaccaaaagcaaccaaccacactctcagaccacagaataaaagaagataaatcaataataagaagatcattcaaaaccatacaattacatagaaattaaacaacctgttccttcctgagtggcatcggggcagacaataaaattaaggcagaaatcaaaaaattattttaaactaatgagaacaaagatgcaacataccagaatctccaggacacaggcaaagcagtttaagaagaaagtttatagtgctaaatacccacatcaaaatgttagaaagatctcaagttaacaacctaacattatacctagaggaactagaaaaacaagagcaaaccaaccccaaagtcaacagcagacaagaaataatcaaagtctgcgctgaactgaatgaatccaagatgtgaaaaaccatccaaaaaaatcagcaaaacttgaaactggttattcaagagaataactaagattgataggatgccagctagattaacaaagaaagagagagaagatacaaataaacacaatcagaaatgagaaaagggatgttatcactgatctctcagaaatacaaaagaaaaaaacctctcaaagactattacaaacacctctatgcacacagagtagaaaatgtacaagaaatgcataaattcctagaaacatacaatcttccaagattgaactgagaagaaattcaaaccctaaacagaccaataatgagtttcaaaatgtaatcagtaataaaaagcttaccaaccagagaaagcccagaaccagatggattcacagccaaatgctaccagacatgggaaaaagtgctgataccattcctacagaaactatttcaagaaattgaggaggacagactcttccctaattcatgctataggccagcatcattctaatatcaaaacctggcagagacaacacaaaaagaaaacttcaggccaatatccctgatgaacatcagtgcaaaaattctcaacaaaataccagcaatctgaatagagcagcacatcaaaaagctaacccaccatgatcaaataggctttaatgctgagatgcaaggttggttcaacatatgcaaatcaataaatgtgattcaacacaaaaacagaactaaaataaaaaactacaagatcatctcaatagaggcagaaaaggcttttgataaaattcaacattccttcactttaaaaacactcaacaaactagatattgaaagaacatacctcaaattaataaaagccatctattataaacccacagccaacatcatactgaataggtaaaagctggaagctttcctcttgaaaacttaaacaagacaaggatgcccactctcacccctcctaatcaacacagttgacttccagtaaactggaaatcctagccagagcaatcaggcaagagaaggaaataaaaggtctcaaaatgtgaagatagaaagtaaaactatctgtttgcagacaatatgattttatgtctataaaatctcagtctctgccccaaagcttttatatctaatacgcaacttcaggaaggttttgggatacaaaatcaatgtaatcagtagcctttctatacaccaacaacatccaagctgaatgccaaatcaagaatgcaatcctattcacaatagccacacaaaaaataaagtaccgagaaatacatctaactaggaacatgaaagatctttacaagatttagaaaacaatactaaaagaaatcagagatgacacaaccaaacagaaaaacattccatgatcatagataggaagactcaatattgcttaaatggcatacagcctaaagcagtttacagattcaatgctatttctattaaattaccaatgacattcttcactagtactctaatggtattctaaacagaattagaaaaaaaaactgttctgaaattcacatggaaccaaaaaagggcctaaagagccaaaactatcctaagcaaaaaaataaaaataaaataaaataaacaaaaaattaaaagctggaggcatcacattatctgacttcaaactatactacatggctacagtaactaaaacagcataatattggtacaaaaatagacacagaccaatgaaacagactagagagccccaaaataaagccacatacctacaaccatctgatcttcaacaaagtcaacaaaaacaagcaatgggcaaaggactccctatttaataaatgttgctgggataactggaaggccatatgcagaagattgagactggatgccttccttacatcatatataaaacctaacacaagatggattaaagacataaatgtaaaacctaaaactataaaaatgcttgaagaaaaccaaagaaataccactctggacatagatcctggcaaagatttcataacaaagatgccaacagtacttgcaaaaaaaaaaatgggcaaatggagcctaattaaaccaaagaccttctgcccagcaaaagaaactttcaacaaagtaaacagacaacccacagaatcataggaagtatttgcaaactgagcaaagctctgacaaaggtcaaatatcccaaatctataaggaacttaaacaaatgaacaagcaaaaaacaaacaactctattaaaaagtgggcaaaggacatccacaggtacttttcaaaacacatttgtgcagccaataagcacataaaaatgttcaacatcactaatcattggagaaatgcaagatatcatgagagatatcatctcacaccagtcaaaatggctataattaaaaacccaaaaaattacaggtgctggcaaggttgtggagaaaagggaacacttatacactgctggtgggaatgtaaattagtttagccactgtggaaaacagtttgggatatctcaaagaacttaaaaaagaactaccatttgacccagcaatcccattattggctgtgtaccccaagaaatgtaaatcattctaccataaagatacgtgcatgcttattgcagcactactcaaaatagcaaaaacacagaatcaacctaaatgcccatcaatggtatagtgtataaagaaaatgtggtacatatacaccatggattactatgcagccataaaacagaatgagatcatgttctttgcagcaatgtggatggagctcgaggtttttatcctaagtcaaccatcatgggaacagaaagccaaatactgcatgttctcatttataagtgggagctaaacaatgaatacacatggacacaaagaagggaacaagagaccctggggcctacttgaggttgaagggtgagaagagcatgaggttcaaaaaactacctatcaggtactatgcttattaccttggtgatgaaataatctgtacaccaaacacctgtgacacacaatttacctataaaacaaacctacacatatacccctaaaactaaaataaaagtaaaaaaataaaaataaaaaagctgggtgcagtggctcacacctgtaatcccagcagtttgggaagctgaggcagaaggatttcttgagcccagaagttcaaggctagcctggtcaacgttataggatcccatcaaaagaaagaaggaaagagagagagagagacattaagaaagaaagaaagaaagaaagaaagaaagaaagaaagaaagaaagaaagaaagaaagaaagagaaagaaagaaaggaaggaaggaaggaaggaaggaaggaaggaaggaaggaaggaaggaaagagaaagaaagaggaggggaggggagggagagaggaaggaagaaaggaaggaaggaagggagagaggaaggaaggaagaagggagggagggaggaaggaaggaagataggaaggaaggaaaaagaaagaaagaaagaaggaaagaaagaaagaaaaagaaagtaagctaactgaagaaaacctgaaaaccaggacagtctagactaaaatagaggaagtcatgggatctgagcacatttcttcataccaaggaattagaagtaaatttaatccctaaagatagaattacaagaggaaagatacaaaagactttaaaaaatcaagaattacaagaggacacaaatggactgcagaattccattggctctgagacagttttggcctgaagtcaagcaggtagcacaggaaccaaagaagcctcaaagagattactgacattgtggaacacacaattctttatagtctcaaaacttcccacaaatgatttatccattgaaacatggctttgctgtgataatacaagtacctcatcaaacttttgctccaatggaagacttattagtcccggtcccagtcattatctgggcaagagaagaagataaatatctgaatgtttcttggtccaaactgttctatcgatacatcttaatagctttttaccagacttagtatcaatactcacagatcatatcaccattcctaacgtctttaatcaatgaactagtctttttattcatcccatccttactcaatctcattcgcattcttgactttaacacccacctcccagactatagaattcctcaagtaaaattacatccactaacatttcatttacaagatgcacattcacactttggattttagtatctgacattgctttgcctccacatttataaaattctggttttttcagtgcagaacttgcttgtattaagttctttctgaagcttcattatgaactctgaacaactaaacaaaactaaatttaaattcaaacttttacatttgcaggcaatatgactttatgtgagttactcccaaacctcacagatgcctctctgtatggcaacatatcagcattgcttgatgtagctcttcacactcaactcaccattaaaaatctaaacaatatcaaaaaaagacaaaactggctacattgtaaactaaaaatgagaagaatatataacaagtccaaagggaatttccatttctactgtctcaataaaaatggattaagaaacattgttggactataaatcacattttccactatctgaataaaatatagaaagcttcaaaaaggggaggaaaaggctttgactgttctttactatgtgtcaccaactctgagacacagtgaataaaataatcagcaaaatatatgactgtcttccgactatattagtcaaagccagaatcacaaactgtcatattctttcattcttctactttattattttccctcttcttatatctatacaaacactacaatctccaatgctcaacacagcagcaatcagacaaggtatttggaggtagagtatatccagtcattattagttgcctcagtatgtctagataaaaatgttgactgagaaataaaaaacagaagaaaatcagaattattctatttggagataaaatttttccacatgacactataccagaaaagaaatgtacctttgttctagtaaatcaaagaatccaattttttaaaccagaaaagatgtaatgccagtccagtaggtagacgtaagatgaatgactcctggtgattgtacagttcaacctattcacgataaaataaaaattttaatttaagaagaggaactgccaggcatggtggctcacgcctgtaatcccagcactttgagaggccaaggcaggtggatcactaggtcaggagttcaagaccatcctggctaacatggtgaaaccctgtctctactaaaaatacaaaaaaaacctagccgggcatggtggcacatgcctgtagtcccagctactcgggagactgaggcaggagaatcccttgaaacagggaggcggaggttgcagtgagccgagattgcaccactgtgctccagcctgggtgacagagtgagactgtctcaaaaaaaaaaaaaaaaaaaaagggaaaaaaaagaaaaggaattaaattagcatcttccaagacaagataatagatatagtctttataaagcaggagatgaatcagaaagaaaaaataaattgaaataaagacacaggtaaaaggaaatgactgaaataagagaaatgcaaggaaattcaaaacacaatgccaaaataaaatctacatataaaaatagtaaggaaattattttacagaaatcctttttacagagattttacagaaactagaatcagcaaatttaatccataaatatatgaaaagaatagcatttcccaaccaagtagggttcatcctagaaattcagaacatttcaacattcaaataacaatcaatgtaatcaccatatgatatagcctagacatctgctcctgcccaaatctcatgttgaattagaaaccccaatgctagagataggacctggtgggaggtgtttggatcatgggggcagattccttatggcatggtgctgtcttcaccatagtgagttttcacaagatgtgatcattgaaaagtgtgtggcacctccccctacacatttctcctgctcctgttttcaccatgtgatgtgcctgctcctcttttgccttctgccgtgattggagcttcctgaggcctccccacaagcagatgccactatgcttcctgagcagcctgcagaactgtgagacaatgaaacctcttttcttataaattaccctgactcagatatttctttataatagtgcaaaaatggcctaatacaccatgttaacagagtaataagaaaaattatatgatcattttattggataaaaaaagcgctcgaaaaaattgaacatccattcatgattaaaaaaaaaaatactctcagcaaactaagaatataggtgaagcctcctaacataacaaagggtatcaacacctaccactcacacgccattcctatccaacattatgctaaatggtgagagactgaatgctttctctgaagatcaggaaactagcaagatgtcattcctcaccatggctatacagcatcatactggaaatcctggcaagtgcaataaagcaagaaaaaataatgaaaaggaatatagattgaaaaggcagaaacaaaaatctatttgcacatgacacgattgtgcctgtagaaagtttcaaagaatctataaaacatctcttaaaactaataagtgaatttaacaaggttccagggttcaaagtgtgtactagtctgttttcatgctgctgataaagatatacccgggactgggcaatttacaaaagaaagaggtttattggacttacagttccacatggctggggaagcctcacaatcatggtggaaggcaaggaggagcaagtcatatgttgtgcggatggcagcaggcagaaagagagcttatgccggggaactgctctttgtaaaaccatcagatctcgtgagtctcactcactatcacaagaacagcacaggaaagacttgcccgtgtgattgaattacctcccatgcagtctctcccccagcacatgggaattcaagatgagatttgggtggggacacagccaagccatacaaaagtgaatacatgtaaaagtcaatcatatttctatatattagcaatgaacatttgaatcttcaaattaataaaaatataaattaccatatcacaaaaaattgaaatactttggaattaatctaataaaatatgaacaggtactatatgccaaatgctacaaatcaccaataaaagaaacgaaaaaagatttaaataagtagaaaaatatactacattatgaactcaaagactgaattgttaagatatcaattcttcctaatttgatatatagatacagcactatcccagtagatattccagcaaggttttttgacagatattgacaagattattcctaaatttgtatggtaagcaaaagaactagaattgccaaaacgactatgaaaagttgaaggactcaaaattatagcaaatcaagacagtgtggtattggcaaaagaaatatagtttccatgtgaagaatccatgatagtctgctagatgctagagacatgaagcccagttccccgtgaccccaaacaagtgagtgaagccatcaggaactctacaaccccccaggcatcccactatctgactgcagccacatgaatgagcccaagacagtccaacagtagaaccatccatcagaagccagccaaaattgcccacccacagaattatgaactaataaatgattgttgttttaagtttggcggattttttttacatagcaataaataactgttaaaccatagtaaccgcaatgccaactggcagcagtggaaatatgatggtggggaagccagcatggaaagaaacagtggttatcttagccaattatgtttaaatgccttacttttgcaaattttacaaaagtatattatcatataaacacattattctgagctttggaagggacaggcataagtgggagactgaatctggagcttcattcaaggtaaatctacctctcgtaagtgtcatgcttaatgttaaatcactaacaatatcccccttaaagatatagagactaaaggattgcctgctataaccttatcatataatattgctgtataaatcttgcccaataaattaacaataatgactatatttaatgcttattatgtatcatcactacactaaggatttcacatggattatttcacttaattataacaacaacctcatgaggtagggactattataacacttttcagatgcagaaactgagccttacagggtttaatggccaaaagttacatagtaaatgtcaggtttccattttcaaaatctgtgttctccatgcctgtaatcgcagaactttgggaggtcaaggtaggtggatcacttgaaccaaggagtttgagaccagcctggacaacataagaagacctcatcccttaaaacaaacaacaacaacaacaacaaaaatattgtcttagtaactacacttagtagtgcaagaaagaaaaatgagataaaagtaatggacgagattattttaattttaattattacatttttccctataacttaaggggatttcctaatatattttctatctttaaaggaaaacagcctatgtttaatttagagctagttatcttaccttatgataaccaccttactgactcttcaattattttaagttgatgctctatatttatacttatagacaaacatcatctggaaatagagatgactatatttttttccaaatagacaattctatagaaaccattggaaaaagttacaactattatatctaatgagacagttcattaaagtaatacatacaatataaatttttttaagcctagttttcctgaaagccagcaataaactgaaaaactataatagggacatatagtatttagaggagcgttgtacctagagattgtgaatgaaatatgcaaagcttatatatgaaaagcttaattttcttatgtaaagaaaatttcaaatattttatcagttacataaaagaacctacaaataagtgaacctacataataatttactatatgtgaagttggaatatgtgaagttgtcaatccttgacaaatgactttgtaagttaaacttcaacccattaaagcctcaaaattgcttgccaactttcttgtctgaatttttttaagtgatgccttcacaggtttcaacacatcaaagatagaatatgatgaatcaaagacctacaaataatagccaaaactataaaactctcttggaagaaatcaaaggagaaaggcttcatgacagtggacttggcaatgatttcttgggcatgacacccaaagcaaaggcaacaaaagtaaaaataaataaatttgctacataaaaattaaaaacttatgtgcctcaaaggacacaaccaacagaatgaaaaggcaactggcaaaatgggagaaaatacttgcaaatcatatctctgataaggagttaatagccataataaattaagaattcctacaactcaacagcaaaaaaaaaaaaaaccttaactttaaaatgggcaaaggacttgaatagacatttcttcaaagaagatatacaaatgtctaacaagcacatgaaaatatgctcagcatcactaatcattaggcaaatacaaatcaaaaccacagtgatataccatctcatacctattaggctactattttaaaaaacagaaaatagtcaagtgttggtgcagatatgcatagagttctagttttgcaagataaaaagagttctggggattggttgcacaacagtgtgaatatatttgacactactgaactgtatgcttataaatgcctaatttgctaaattttaggttatatgtattttactacaactaattttttttttttttttttttttttttttttggagataggaccttgctctactgccagactggagtgcagaggcacaatcatggctcattgctgcttcaacctcctgggctcaagcaatccttccacctcggcctcccaagtatctggggactacaggtatgcaccatcacacctggctaatttttttaattttttgtagagacagggtctcactatgttgcctaggctggtatcgaactcctgggtttaagcaatcctcctgcctcagcctccaaaactgttggtattataggcatgagcctccacgcccagacaaaattttttttagcgacacaaacacagcattcagtgtatcaaagatgccatatgaagaattaaagacctaagtatgagagctaaaactaaaaaaaactttagaagaaattatagggatcaacttttatgaccttggatttagcaatggttttgtagatatgtgccaaatgtatgaacaacaaaagaaaaaataaatatattggatttcatcaaaatttaaaagtatacatatcaaaggatgctattaagagagtgaaaagacaacccaagaatgggagaaaatatttgcaaatcatatgtctgacaagggtctagtatccagaatatactttttttaactcttacaattcaacaacaaaatggcaatccaactttgtacatgagcacataggtttggagttgaacacttgaatagatatttctctgaagaaaatatacaagtgtcaaataaccaaaaaaatgttcaacatctctagccattaatataatgaatattaaaggtacaaaagtataatctacatatttaatcataaaaattaaaatattaaatactgacaccaccaaatgctggtcaagatgtgaagaaactggttcactcatacatagtgagaatgtaaaaagtgtattagtgtctgttttctgagtttattcctttagttaaacctaaaatcactatacatgttcatgataattagaatagaaaagggacaaagaacaaatagaaataaattctattccttctatatagcagtactttgttgggtatagatggaaaacatcagtcaggagcattaacttgagttgatcgtcaaaaatgtagttacttttagcatgtgttttgctttagtatatatacagaggctgtaacgaagttgaactatcccatctttcttctcatttgtaatacagtcatacaaacaaaaagatgaatgctactagaaggaggtccttatcaaaaatatgacccaatgcatttaggtgacatgaagaaaatcttttttctcctaggcctgagatccttcatccaaaaacttagaagatggaatgagatgatctttaagttttggcaatctatgtacacacatcaattatacatcatgacatagctagacaacaaggctgtattttctggacccatgatggtaggtttgaccatgtgacttacttaaaacaacaatgatgcatgtatcttctaagagccaactgaaatggtgtcatctccttgtccctctgtaaataaaaaagacaatgtcccaaaaaggggttgttccttgagcttcaaccctgaagtgaagatgacatggaagaatcaacagctgacattaaccaatggggaaatacacctctgttgttgttactacagcatcacctaatacaaaataattacatacaaaaatttgctaataattgagtatcggttcatagttaagctttaaaacacaaaattacccaaacttaatagaaaactatataaaatgtgacacaatagaaataagttaaaagcaactttaaaaaatgaaaaatagtatttgtagtaaaagaaattgacaaacatatacacagaatgtttttatttttattttatttttttaaattggtgtacatagaactttccttgtgatttctgagtcctaaaatcactatcccaagtaagaatcaatattgctaaaaccatttttcttcatcattaaaatgtttcaagataatatttccatcattatataaaggccaatcctccttagcaatccaggtttccaaatatgatctacgggtaaggcttctcctgaagtaatgcgacataaccataacattaatttcttagctgttaatttgttatcatttttaaggctaactagagcacctggaaattctatgatctttccaatgctccatgggtggcaaaagaaccattggttttctcttctctttgctccctttaagtagaaaacctggaagtaaaattctttctagttatgaaagagatcctatcaaactagattttaaaaacaaagcccagctgtatgttgcttacatgagacatactgtgtcaatgacttatccccatcagcatgcaactttaattttatcaatgcaacctttgcagctgtttcactattttttgcacctttctgttgttcacttactgtttcttctgccttggaatcaataatgtctttaacgattttctgagaggcagccataggagacttttggatttccagtttttcacattcatggtctgactgatgatggtgtctcaggcaaaaattcttctcacaataaatacatataattaccacaagttctcattcagcacagtccttgaatgaatggataagacacatgtttatctgtttttagtcctcattgattacagtcacctcagaacaaccatgagactcctggatttgtattcaaggcaaaatattcctaaacaaccataacatacaaatggaggaaaacccactgctgccatccatggagccaaagcagggctcaggtctcatgtgaccaaggatggggattccccaatcaccttgatacccgcagtgctacacctggcagtgctactggatgttcaactccgtcatctcccaggtgccacaaggggcaaggcagagcctgagggggtgggataatctgttagtgtcttataaataaatatgcaattaccatgcactgagtaattgcactcttgggcatgtatcctaaagaaatgtaaaattatatttaccaataaaactgcacatggatatttattataactttatttgtactagttaaaactggaaaaaacccaaagtgtacttcaacagatgaactgttaaactcgtaacaataatatagaggcctgtaatcccagcactttgagaggccaaggtgggtggatcacttgaggtctggagttcgaaaccagcctggccaatatggtgaaaccccatctctactaaaaatacaaaaaaagtagccaggtgtgatgatgcacccctgtaatcccagctacttgggaggctgaggcaggagaatcacttgaacccaggaggtggagtttgcagtgagcagagatcgtgccactgtactccagcctgggcaacagagcaagactccgtctcaaaaataatagtaatgataatatatagactattattgagcaacaaaagaaataaactattgatacacacaacaatttagatggatctcaaggggattttgctgagtggaaaaaaaacagtcttcaaaggttagatactgtatgattcatttatgtagcattcctgaaatgacaaaattacagagatagagaacagagtagtagttgccaggtgttggagatgagaaggagggaggtggtggtgtttataaaaggataacagaaaggattcttgtgatggaagtactttgtattttgactgtgggtggtaataacacaaatctacacatgtaataaaattacatagagctaagtacagacatatgcaacaagtgcatgtaaaactggcaaaatctgaataaggtaaatggattctattaatgtcaatttcctgattatgatattgtactatggctatgtaatatgtatataacatttgtaatccctgggccagcagcactacccagcacttgttagaaacacgaaactcgtgggcctgacttcagacctactgaatcagaaatactggatggggctcagcaatttgcttttaacaagctcttagctgattcagatgaatgcaaatgactcttaaccactgctttagcttacaacctgctgatccctggggaaccatacctaggctggatggagacaactgtttatcacccaaagatccaggttttcaagctggaagcagtaattgcatgagatttgcaggttgatgaacttggggaagagatgactgtattccataaaagaggaaaaaaggtgtctaaaaatgttctgtagccacagggatagactctatttgttaactgacccaacttctctcttcctgccttctagtcaggagtggccatgtgacatgtgacactgttctgattaatgagatgaaagtggaaatctgttatgaggttcctgggaaaacttgtgttttcttgatccacgtttggccccctttcccttttgatctactgagtgcacatgtaagatatctatcctaaggaaataatcagaaacgtatatacaaatttagctcgttatctttatcatagtgtatttaaaccccatctctactaaaaatacaaaaaattagccgggcgtggtggtgggcacctgtagttccagctacttgggaggctgaggcaggagaatggcatgaacccatgaggcagacctggcagtgagctgagattgcaccactgtactccaggctgggtgcctcagtgacagagtgagactccatctcaaaaaaaaaaaaaaaaagaaataatcttagtgttcaacaacaggactataaataattttttgtatttttataagacggaatttttgtggccattatggatgatgatcactgagacttttgatgatatggaaaaacttataatattaagtgaaaaatcaagatataaagctatatacatatttgataaataattgcataaatatattcacatgcatatacactttcaatcttcgcttaaaaataaatttgtactataatcaatcttttaaggtaagaactgttctttaagtattgtctaagtggagtttcaataattctttcttacataaagcacactgatagtgatttttaatgtacacccaagtttaagaaccattggtatactctatataggtgtgtgtctgtctatatatgtaaatttttttacgtgtaagaacactccaaaatgttaacagagctataactgggtgtaatttctccattataatgaactttatattactgtgtctttgttttcatttgtttgttttttgacacagggtcttgctctattacccaggctgtagtgcagtggcaccatcatagctcactgcagcctctaactcctgggctcaagtgatcctcccacctaagcctcctgagtacagtcatatgccaccatgcctggctaatattttttcaattttttgtagagatgggggggtctcgctttgttgcccaggctggtctcaaactcttggcttcaagcaatcctcccacctcagcttcccaaaatgctgggattataggtgtgagccactgcacccaggccttattgtgtatgtttgtaattttctactgcataagcattattacttttaatacaagaaaaatgtaacttttaacattaaaaagagaagaggaaataattcaagctcaaggtagagcaacatagagcgagaagcatctcaaagacaggaacgagatgtctgaggggtcttaaatatctgccttcaaatggtatttaagcatctcctcctcatcaggctctagtttatcaatcaggttgagcattacaaatccaaaatctgaaatttgaaatgcttctaaatctgcaacttcttgagcaccaacatgacgctcaaaggaaatgctcattggattatttcggatttcaaactgtcagatttgggatgctcaaccagtataatgaaaatattccaaaattggaaaaaaattgaaatctgagacacttctggtccccaccatttctgataagggatactcaatctataatagctacatgccagtttacatgctcctccctggttcaaacaatggaatcagatcaatttacagagtctttcaaagaattacagcatacatatatatgcaaagaacaagtataagtttattttagttgcatataactttttccttaatatgagataaaccattttcctaacttatgtttttgcctttggggagcctctattctcagatgcacagaaagcagaaaacacattggggaaaaaatcgctcctcaaggagtggtgtgatcaatgctctttccatgcaccacctctcactccacttccacctggaagatgtaatgcagcaggagaaaccagaccctaaatattttaccaggtgtttttctaacagtttatgattctagaattcaaattagatttttaattttagaataaggatttttaaatcattaaaattcttcagaagcttccactgcagagctagtaataataacagatcattgaagcaacagccatccctcccaaggcaacactccagccataatcaattcacttaatgcccacgggagtcaggtctttgtctcccttactgcctcaccgtttatttcaatagagaactgaacccaaaaggaatgaaatttatagtgcactttttgccactgataaactatagaattaaatagaacatataatttctaaaatgagctatgctggtgaatttatgtgaacagttacttatgagatgacttgtgggaaatcaaggtaagttcacaattactgaacacgaagcaccaactggaatttcaaacgggtagaagagacgataagatacaactatgcatatctaatagacataggattctacattaatttatatagctctccagagccacataattcagctggttgtttattgaattccttcattccttttggaaagatgacctcaagtttttgaatggctacatggctaaaaaatacctagcttttggggaagggtaaatttaattaacagatatattatttttagaaaacgattacaattttgtagtttcaaggcagatataaatgaagtcacttgaaagctaaatggttacttccatttctacagagcaagtcatgagaacaaactagacggttcgaagtccatttatccaagacaaaggctcttttggaagctcaatcacccagtccttggttgatatattctgacacagctttgatttaccaggggatttacaggactagttaattagaaaatcatttagccagataaattcactatgcctttatctctgttatgcttattcactgactaggagtaatcgtcgttgctaatctatgccttcctatactgctcttagtttctttcctgctgatccaatatgtattgccaccctttcttgcaaacctttcacctgtgccctctggaatctccaggccatggaaaaaacagatttttaaatattatcaacgtgaatgtttctcatggacatttcttctcttaaaaacttctggccgggcgcggtggctcacgcctgtaatcccagcactttgggaggccgaggcgggcggatcacgaggtcaggagatcgagaccatcttggctaacacggtgaaaccccgtctctactaaaaatacaaaaaattagccgggcgtggtagcgggcgcctgtagtcccagctactcgggaggctgaggcaggagaatggcgtgaacccgggaggcggagcttgcagtgagccgagatcgcgccactgcactccagcctgggcgacagagcgagactccgtctcaaaaaaaaaaaaaaaaaaaacttctcagatggtgctttttatgttcttatcctcccttaaccccaaagctgatagaatgagtgttctccttactcctaaatgttacttaaagacctttttgtttttaccctaacataataaacccttctttttgcataaggtgattaaggaatgttggcatgtgttaaagataaaaggtggtatatagggtaacacaaactttaggagaaaagtgttgctttcttttgaatatatttattattttttataattctatactcccaattagtttctaagttatatattatattgctttgttttttaatgattgccttagagattatgacatctatctcaacttaacaaagtctgatattattttaacctcctccaggacaatacaaaggccttagaatactttactacattgggctggatgtggtggctcacgtctgtaatcctagcactttgggaggctgaggcgggcaaatcacttgaggtcaggagatggagaccagcctggccaacatatgaaaccccatctctactaaagatacaaaacttaaccgggcatggtggcacacgcctgtaatcccagctactggggaggctgaggcaggagaattgcttgaacccaggaggcggaggttgaagtgagccgagatcacgccactgcactccagcccgggccacagagcaagaatccctctcaaaaaaaaaaaagaaaaagaaaagtaaaaagaaagaaaataataatattttactacattggctacattggctgggtgtgatggctcacgtctgtaatcccagggaagccaaggtgggtggatcacttaaggtcagcagttcaagaccagcctagtcaatatggtgaaagcccgcctctactaaaaacacaaaaattagccaggtgtggtggcacgcccctgtaagtctcagctacctgaggctgaggtaggagaatcacttgagcccaggaggtggaggttgcagtaagtcgagattgggccacaggactccagcctagagcgagactctgtctcaaaaaaaaaaaaaacactttactacatttaccctcattttaatttacatatttgttgatgtgatgtattttatttctctggatggatagatagatagatagatagatagatagatagatagatagagtggaagatatagtccatactcaacacaaaacacttctgtgaccagatttatgggggtttacccccataccaagtaatttcacaatacttgctgatgtcttgtcaatactttagttcaattctgatactatctaactgaagatagtgtcagatcccacagattaagggctcagctccacagaactgccccacttctgatgccaatcacaaatcctagcctctggaacttctgattgacaagctataagttggggtttttcaagcccctttccttgggttcagtcatttgctaaagcatctcacagaactcagaaaagtgctttatttccattttccagtttattataaaagatacagtggagtcctaataaaataagtaagccacagcaaggagagggcctgaggtagggaagaacaattgttctgaaagacagttaatcacagacaatctgctggcatgacatcctactcccagataccttgttccacatgtagccccaccagaatgaccttatctacaaagccccgctagtatgaccttataaaacttccctccagctcctgcctctttgcagacagccccttctctgctgtgctgccccttgcttcctggcaatgcactttccctctaataaatctttatttctttctccacatctgtcttgataaattcttttaccacctgcaatgctggccccagccagtggcacccatgacagatactaaaaaggatacagatggggatgcatagggcaagctatgcgggaaggggtacaaagctttcatccctttccaggtgcatcatctttctagcagccccatgtgtccaaaagctctctgaaccccttcccttagggtattttttttttgaggctgcactttgtggctgtgatcaattaagtcactggctataggtgatcaactctaccttcattccctctcccctcctgtagtgagccgaaagtttcaaatctctaatcacatggttggattccctggcaatcccccctcatctagaggctatccaggagcccccacccatcactcatctcattagcataaaataagacacatcacattggagattccaagggttttaggagctgtgtgccagaaaatagggttgaagaccaaatggatatttgttattataaatcacaatatcttagacacagagagaagataggtaggtaggtaggtagatagatagatagatagatagatagatagatagatagatgacagataatagatggatagatagatagatagaattctaaataccataagacagttttatcattgttttaaaccacattaatttaaacttacctctttctttgctctccatttctttctatacctctgatcttccatccagggtaattttccttcaacctaaggaatacccattgaaatttattttattgtgattatctctgtttctgttgatctgaaaatttatatactattttcttatatccaaagggtatttttggtttgtagagcttatatttcagttgtcataattgtcagcaccttgaagaagtcattccactgttttctggcctgcagatttgttgagaattcatttgtaaatccaattgttgcttccttgatggcagcctatcttgtttgtatagctgctttaaaggttttctatttggtttgttttatgcaatttctctatgaagtgtctagatgtacttttctttttattcaactgccatgggattcattggatttttgtgtattgatgtctttcaccagttctaaaagtctcagccattatctcttcaaatatttgtaaaagatattacaaaatgtcactttttatagctgctagttttctggccaatttttcaggcttggcctttctgtttgtaaacacagaaatatcactgttttatagactgtgtctgataattccaatctccaggtctctgggggtttgtttatgtttcttgatttttcttctggttttccccaacttattttgtccctttgttttctttgattatatgctatacgttttatttgaaaacatccgtatagaaattgttataggccacagataatattattttctcctgaaagtacttttattttcttctgctaggctcctaaagtctgggaacatattaatccaagttcaagaacagagatgtttttatgctaataaaataagtggtcatcttggaaaccccaaacatgtgatcccaggctctgactattgctctcttgactacccaaaatactgctcagcctatcaactgccaatgtcaaataagcaaatattctctaggtgaaacttcagtgttcccagacttccctgcatcctgcatgtcaatccagtaattgttttatatatatatgcctttagttagatgccttcagttacagatatatgtatatgtatgtatgtacataacataactaatatatatctctatacatatatatcatacatacacatacatacatatatattagttgtgtccagtgggaaggtttgtccaaattatccagtctgatgttactggcctttcctttctttcctgtaactaaacttatcttgattttgagcttccatcctgctaggtagtaagcggaaataatttacactttctaactaagggcatctttggctatttacttttataatagtaaattcagtctcttttgaaaaaaatgtgtcttttgggacaatatcaagtgctgtctaatttctcccctccccctctacccaagaggtaatcaattatacttgaaaacttatgaaggagctcaggaaatttcacccccaaaatataacatccttatatgttgattattttaaattaatggcccttgaaggtcagcagatgcttgaagaggctctatactgatattcctttatctattttaagactaaaccagggggatggcagcattgagagggaaatgaaggattcaaccaggattggctcagagccaagagggactcattagtgctgggaaaagataagtgggagatcctcattaccagtgtggattactgcaatcctagctacaggagacccccacagttctcagaggccctgagattagtacaggaagttgcctagagtccatatggcttcattgctctagaaaaggaattcatgttgggtctcccctacttgccaagacccaaaatgctacagtttggtgccattctgagaacagagctagagtgcatcctgcactagaggccaatagctcctgcatctccacatccttgaggccaatcatcaacctaacatgctcacacaaaaggctggaacaccacaaccccagctacaccaggaagtacaaccatgacaatagcacatgagcccatgaagcaccctgcaccctaagaaacgggggatttaacacagcaagtagaccatccccaagactgaggtaaccaacaaatgtgtcccccaaggcccaaagaccagcacatgtagtatctaccaccactaaggggaccccatccacctcaaccagtgaagacaccatgcattatgtgcacctgccagggcaaaagtatcagtttgctcagcacccaccattgctagtgatgacaacaactccatgactggcagagctgccatacatgctacacacacacacaccaagggcctgagaactgacccatctctgtccccagcaaaaccataccactaccttaacaaacacctgcagttcttaggacattgaggcactcacagacatcgctgatatttattacagccaaagaaatcacttggagactacactacagcaccaacctaaaaccaaagccaaaacactctacctaactgatactgtaggaaacatctgcgtgaaaaagtttcctccacaaaaactactccataaaattgtaataagcagctattccaccagatgcacagatatcaatgaagggacacacacacacacacacaaaaaaaaaaaaacataaaaaagcaaggaaagatgacaccttaaaaggaacacaataactatgcgggaaccaaccctaaagaaaagggaatgtatgaaatgtctgagaaggaatttaaaataatgatcttaaggagactccatgagatacaaaaaaaatacaggtagacaattcaacaaaatcagaaaaacaatacataatctgactgagaaatttaacagaaatagatatcatttaaaaagaaacaaacagaaatctcagaaatgaagaattaaatgaatgaaataaaaaatataatcaagaacttcaaccacagactagatcaagcagaagaaagagtttctgaactttaagacaggttcagaaagtttcaaaagacaggccttttgggaggagccaagatggccgaataggaacagctccggtctacagctcccagcgtgagcgacgcagaagacgggtgatttctgcatttccatctgaggtaccgggttcatctcactagggagtgccagacagtgggcgcaggccagtgtgtgcgcgcaccgtgcgcgagccgaagcagggcgaggcattccctcacctgggaagtgcaaggggtcagggagttccctttccgagtcaaagaaaggggtgactgacgcacctggaaaatcgggtcactcccacccgaatattgcgcttttcagaccggcttaaaaaacggcgcaccacgagactatatcccacacctggctcagagggtcctacgcccacggaatctcgctgattgctagcacagcagtctgagatcaaactgcaaggcagcaacgaggctgggggaggggcgcccgccattgcccaggcttgcttaggtaaacaaagcagccgggaatctcgaacttggtggagcccaccacagctcaaggaggcctgcctgcctctgtaggctccacctctgggggcagggcacagacaaaaagacagcagtaacctctgcagacttaagtgtccctgtctgacagctttgaagagagcagtggttctcccagcacgcagctggagatctgagaacaggcagactgcctcctcaagtgggtccctgacccctgacccccgagcagcctaactgggaggcaccccccagcaggggcacactgacacctcacacggcagggtattccaacagacctgcagctgagggtcctgtctgtcagaaggaaaactaacaaccagaaaggacatctacaccgaaaacccatctgtacatcaccatcatcaaagaccaaaagtagataaaaccacaaagatggggaaaaaacagaacagaaaaactggaaactctaaaacgcagagcgcctctcctcctccaaaggaacgcagttcctcaccagcaacggaacaaagctggatagagaatgattttgacgagctgagagaagaaggcttcagacgatcaaactactctgagctacgggaggacattcaaaccaaaggcaaagaagttgaaaactttgaaaaaaatttagaagaatgtataactagaataaccaatacagagaagtgcttaaaggagctgatggagctgaaaaccaaggctcgagaactacgtgaagaatgcagaagcctcaggagccgatgcgatcaactggaagaaagggtatcagcaatggaagatgaaatgaatgaaatgaagcgagaagggaagtttagagaaaaaagaataaaaagaaatgagcaaagcctccaagaaatatgggactatgtgaaaagaccaaatctacatctgattggtgtacctgaaagtgatgtggagaatggaaccaagttggaaaacactctgcaggatattatccaggagaacttccccaatctagcaaggcaggccaacgttcagattcaggaaatacagagaacgccacaaagatactcctcgagaagagcaactccaagacacataattgtcagattcaccaaagttgaaatgaaggaaaaaatgttaagggcagccagagagaaacgtcgggttaccctcaaaggaaagcccatcagactaacagcggatctctcggcagaaaccctacaagccagaagagagtgggggccaatattcaacattcttaaagaaaagaattttcaacccagaatttcatatccagccaaactaagcttcataagtgaaggagaaataaaatactttatagacaagcaaatgctgagagattttgtcaccaccaggcctgccctaaaagagctcctgaaggaagcgctaaacatggaaaggaacaaccggtaccagccactgcaaaatcatgccaaaatgtaaagaccatcgagactaggaagaaactgcatcaactaacgagcaaaatcaccagctaacatcataatgacaggatcaaattcacacataacaatattaactttaaatataaatggactaaattctgcaattaaaagacacagactggcaagttggataaagagtcaagacccatcagtgtgctgtattcaggaaacccatctcacgtgcagagacacacataggctcaaaataaaaggatggaggaagatctaccaagccaatggaaaacaaaaaaaggcaggggttgcaatcctagtctctgataaaacagactttaaaccaacaaagatcaaaagagacaaagaaggccattacataatggtaaagggatcaattcaacaagaggagctaactatcctaaatatttatgcacccaatacaggagcacccagattcataaagcaagtcctgagtgacctacaaagagacttagactcccacacattaataatgggagactttaacaccccactgtcaacattagacagatccatgagacagaaagtcaacaaggatacccaggaattgaactcagctctgcaccaagcggacctaatagacatctacagaactctccaccccaaatcaacagaatatacatttttttcagcaccacaccacacctattccaaaattgaccacatagttggaagtaaagctctcctcagcaaatgtaaaagaacagaaattataacaaactatctctcagaccacagtgcaatcaaactagaactcaggattaagaatctcactcaaagccgctcaactacatggaaactgaacaacctgctcctgaatgactactgggtacataacgaaatgaaggcagaaataaagatgttctttgaaaccaacgagaacaaagacaccacataccagaatctctgggacgcattcaaagcagtgtgtagagggaaatttatagcactaaatgcctacaagagaaagcaggaaagatccaaaattgacaccctaacatcacaattaaaagaactagaaaagcaagaccaaacacattcaaaagctagcagaaggcaagaaataactaaaatcagagcagaactgaaggaaatagagacacaaaaaacccttcaaaaaattaatgaatccaggagctggttttttgaaaggatcaacaaaattgatagaccgctagcaaaactaataaagaaaaaaagagagaagaatcaaatagacacaataaaaaatgataaaggggatatcaccaccgatcccacagaaatacaaactaccatcagagaatactacaaacacctctacgcaaataaactagaaaatctagaagaaatggataaattcctcaacacatacactctcccaagactaaaccaggaagaagttgaatctctgaatagaccaataacaggctctgaaattgtggcaataatcaatagtttaccaaccaaaaagagtccaggaccagatggattcacagccgaattctaccagaggtacaaggaggaactggtaccattccttctgaaactattccaatcaatagaaaaagagggaatcctccctaactcattttatgaggccagcatcattctgataccaaagccaggcagagacacaaccaaaaaagagaattttagaccaatatccttgatgaacattgatgcaaaaatcctcaataaaatactggcaaaccgaatccagcagcacatcaaaaagcttatccaccatgatcaagtgggcttcatccctgggatgcaaggctggttcaatatacgcaaatcaataaatgtaatccagcatataaacagagccaaagacaaaaaccacatgattatctcaatagatgcagaaaaagcctttgacaaaattcaacaacccttcatgctaaaaactctcaataaattaggtattgatgggacatatttcaaaataataagagctatctatgacaaacccacagccattatcatactgaatgggcaaaaactggaagcattccctttgaaaactggcacaagacagggatgccctctctcaccgctcctattcaacatagtgttggaagttctggccagggcaatcaggcaggagaaggaaataaagggtattcaattaggaaaagagaaagtcaaattgtccctgtttgcagacgacatgattgtttatctagaaaaccccattgtctcagcccaaaatctccttaagctgataagcaacttcagcaaagtctcaggatacaaaatcaatgtacaaaaatcacaaacattcttatacaccaacaacagacaaacagagagccaaatcatgagtgaactcccattcacaattgcttcaaagagaataaaatacctaggaatccaacttacaagggatgtgaaggacctcttcaaggagaactacaaaccactgctcaaggaaataaaagaggacacaaacaaatggaagaacattccatgctcatgggtaggaagaatcaatatcgtgaaaatggccatactgcccaaggtaatttacagattcaatgccatccccatcaagctaccaatgactttcttcacagaattggaaaaaactactttaaagttcatatggaaccaaaaaagagctcgcatcaccaagtcaatcctaagccagaagaacaaagctggaggcatcacgctacctgacttcaaactatactacaaggctacagtaacctaaacagcatggtactggtaccaaaacagagatatagatcaatggaacagaacagagccctcagaaataatgccgcatatctacaactatctgatctttgacaaacctgagaaaaacaagcaatggggaaaggattccctatttaataaatggtgctgggaaaactggctagccatatgtagaaagctgaaactggatcccttccttacaccttatacaaaaatcaattcaagatggattaaagatttaaacgttagacctaaaaccataaaaaccctagaagaaaacctaggcattaccattcaggacataggcgtgggcaaggacttcatgtccaaaacaccaaaagcaatggcaacaaaagccaaaattgacaaatgggatctaattaaactaaagagcttctgcacagcaaaagaaactaccatcagagtgaacaggcaacctacaacatgggagaaaattttcgcaacctactcatctgacaaagggctaatatccagaatctacaatgaactcaaacaaatttacaagaaaaaaacaaacaaccccatcaaaaagtgggcaaaggacatgaacagacacttctcaaaagaagacatttatgcagccaaaaaacacatgaaaaaatgctcatcatcactggccatcagagaaatgcaaatcaaaaccactatgagatatcatctcacaccagttagaatggcaatcattaaaaagtcaggatcaacaggtgctggagaggatgtggagaaataggaacacttttacactgttggtgggactgtaaactagttcaaccattgtggaagtcagtgtggcgattcctcagggatctagaactagaaataccatttgacccagccatcccattactgggtatatacccaaaggactataaatcatgctgctataaagacacatgcacacgtatgtttattgcggcattattcacaatagcaaagacttggaaccaacccaaatgtccaacaatgatagactggattaagaaaatgtggcacatatacaccatggaatactatgcagccataaaaaatgatgagttcatgtcctttgtagggacatggatgaaattggaaaccatcattctcagtaaactatcgcaagaacaaaaaaccaaacaccgcatattctcactcataggtgggaattgaacaatgagatcacatggacacaggaaggggaatatcacactttggggactgtggtggggttgggggagggggaagggatagcattgggagatatacctaatgctagatgacatgttagtgggtgcagcgcaccagcatggcacatgtatacatatgtaactaacctgcacaatgtgcacatgtaccctaaaacttaaagtataataaaaaaaaaaaaaagaattattaaaacaaacaaacaaacaaaaaaaaaaaaacaaaagacaggccttttgaaataacccaatcagaccaaaaaaaaaaaagaatgtaaaaagtctgtaagtctacaggacctatgagacaccattaaaataacaaatattcacattaaggtaatttcaaaagggaaatacatagcaaaggacagagaaaaccaattttataaaatacctgaaaacttactaaatcttgacagagatagggacatccagatcaaggaagctcaaataaagtcaacccaaaaaaaatctctctgaagcacactatagtcaaactgtcaaaagtgaaagacaaaaagagaattccagaaaagagcaagagaaaattttcaagtcgtgtataaaaggatttccattaaactaacagcagaaatcttacaggccaggagaaaacaggttgatatattcaaagtgcttttaaaaacaaaaaacagaaaacaaaaaactaagccaggaacgctttacctagcaagctatctttcagaaatgaaggagaaataaagtctctctcagacaacaaatactgagagaattcatcactagactggcctcacaagcaatgcttaagggagtcctacatctggaagtgaaagaacagtaaataccatcataaaaacacacaaatatataaaattcactgctatagcagacacatatgtgcaagaaaaataaatcaaaccttatcactatagaaagccaccaaaccacaacagagaaggagaaaacacagacacacagaccaatggtacagaagggagaactgagaaataaattcacttatttatagccacctgattttccagcaaggtgccaagaacacactttgggtaactgatatcctcttcaataaatggtgttgggaaaactggacatccatatgcagaagaataaagctagattcctatttctcatcatatacaaaaatcaactcaaaatgaattaaaaaattaaatttaagacctgaaactccatcttccccctcccctatgaagaagagtatttaagcatatgtacctcactgggttgttgtgtaaacttctaatttaattaaagaattaaatgtaagacctgactctccatcttccccttcccctttgaagaagggtacataagcatctgtgcctcactgggttattatgtaatcattctcctgtgattcccccatgcttatgcaaattaaataaatttgtatgcacattaaataaatttgtatgccttttactagaagaaaacatagagaaaatgctataggtcatttgttctgggcaaaatttttgtggataagacctaaaaagcacaggcagcaaaagccaaaatagacaactgggattacataaaataagcttctgcgcagcaaaggacacaatcaacagagtgaatagacaacctacaaaatgaggtaaaatatttgcaaaccattcatccaacaagagactaatagaatatacaaggaactcaactaacatttaaaaaaacaaataatcttattaaaagatgggcaaaggatctgaataaacttttctcaaaggaagacctacaaatgaccaacaggttatgtgaaaaaaatgttcaacatcactgatcatcataaaaatgcaaatcaaaaccacaatgagatatcatttcacctcacttagaatggcaattagcaaaaagaccaaaaaaacaacaaatgctagtgaggatgaggagaagggctagtctcaaactcctgggttcaagcaatcctcccacttcagcctcccaaagtgctgggattataggcataagccatcatgcctggccatgaacacttacacactgttggtgggaatgtaaattaataaattctttataggaacagtatggcggctcctcaaaaaactaaaaagagaatgaccatgcaatccagcaattccactaatgggtatttatccccaaaaaaaggaaatcagtatgtgaaaaagacacctgcattcccatgcttactgcagcactacagacaatagccaagacatggaaccaacctaagtgtccatcaatgggtgaatagatttttaaaatgtggcacatatccacattgaaatactatttagccattaaaaaatgaacttccgtcattcacagcaacatggataagcctggagggcatcatattaagtgaaatagatcaagcacagaaagataaatacgctatattcgcactcatgtggaagcttaaaaagccaatttcatagacgcgaaggacagaatagtggttactagaggctgggaagggtaggggagagagaatgataaggagaagttggttaacagatacaaaattacagctagagaggaggaataaattttagttttctatagctctgtagggtgactatagttaataataatttactgcatattttcaagtagctagaagataggatgttgaatgtttccaacacaaaaaaataataaattcttgaggtgatgaaaatgctagttaccctgatttggtcattatacattgtatacatgtatcataatatcacactggccaggcatgttggctcatgcctgttcagcaatttagaagactaaggtgggaagatcacttaaggccaggagttcaacactagcctgagtaacacagtgagatcccttctctacaaaaaatgtaaaaattatccaggcatgttggcatgtgtctgaagtcccagctactcgggaagctgaggcagaaggattccttgagcccaggagttcataattacaatgagctatgtataatggtgccattgcactccagcctgggcaacaaagcgagatcccttctatttaaaaagaaaaaaaacacaccgtatcctctaaatatgtgcaattattatgtgtcaattaaaaaattagtttcataaatgatttaactggccaaagaaaatacaactgctttccattatctcattatctatcccagaaaaaaaagactaaggaataaaaccacacctggaaggactttttctcaagataatgtctgccccacaggaccattcaaattccaaatagaattatttacaagttagtttctgtctccctggtccattcattctccctaataatcatttactactcctcaaaggaattgtctacaatctccatcttccccttcccctatgcagaagggtacataagcatctgtgcctcactgggttttgtgtaatcattctcctgtgattcccccatttaatgtgcttatttaatgtgcttattattatttaatgtgcttattcacattaaataaatttgtatcccttttattcctgctaatctgtctatcatcaaatcattttagcagacttagactctaaccttcagagggaaagtttgaacttccctcacttaacatattcttaaataaatgagggaggcaccttgagtccatgtatgtaatcttcggttagcctctgaaacttactggcctccaattctgaaatgtacaggtgataaatttcttggtctgttttctaggtacaatcattgtctggtggccacaccttagctctttctgaggttgcagatgctctaagtcttagccacatcctccatcttgcccttggattacaccatcaatccaggaccccctacgttagagtcaacttgtcttttgccaaaactgccccatagcaggcccactcattctgcactctgctatcttctgtgtcaccacaaggagcacactggacattcttgattttctcaagagaccgatggggaccgtgtttcttccaatgttcttttcttattcctgcatcatgttaggggtggccctttctgaatgtggatcaaattggagaggcctctcatccacagggaatgcctgaagaaggacgtcactaactctgatgtcctctggttttcctatacctgtctattgtaccactacctcttctgatcctcaatatttggccctgagtggagcctatatagggatgctaacttgtgaccttttcacccaacctgttttcctctccagatgtcctatgtgaaagcctttcttctcttcctaactggtggaggcttccaagccttatattctatgtttcctccacttataatagaactcgtatttagtgctctaagcctggcttttaatacataaagagaattgtttgctttatttgttcatgttttgtttgtttagaaatatcttttcaccggccaggtgcaatggctcactcctgtaattccagcacctaaggaaaacaaggtgggtggattgattgagcccaggagtttgagatcagcctgggcaacatggcaaaacctcgtctctataaaaaaaaaaaaatacaaaaactagctgggcgtggtgatgtgtgcctgtcgtcccagctacttaggaggctgaagtggaagaatcgattgaccccagtaagtcaaggctgcagtgaaccatgatggtgcccctacactccagcatgtttgacagagcaagaccctgtctcaaaaaacagaaacatattttcacacttagtgaattcttgccatcagattagtgtttttccagaggcccctaaaaagtcagttatgaacctgcaagctgattgactcctttgttctagatggaatctgccctcccctgtccctgaagggagacagcttctaggcaacaagattcacaattgatgaaagtaatctgaagatatttcaagtgtaataaggtcaaaaatttaataactaccattgagatgtgcaaaatatgcaggggttttttgttttctataactaatccaatgttgttcctgggtacccatccctgtgagcaattaaggaagacagggataaggtaaactagccaatttaaagtagctcattctcttctgatttcaaattttctctttcagtttaaaatatttcatttatctcttttccctattcctcctcccaaaatgcaacctctggatttagtggaatgcttacatgttctcaagcagtagaactcaagtgggaaatcattccagatgtttccacatcaaaatgagacaatcagccagacatggtggctcatgcctgtaatcccgacactttgggaggccaaggagggaggaccacttgaaccaggagtgtgagaccagccctggcaacatagggagaccccatctctacaaaaactaaaataaaattagccagatgtggtggtgcatgcctaaaggcccagctacacaggagtctgggcctttcactctgggtgacagagtgagaccccacctggaaaaaaaaaaatgaaacaacctcttcagagtgaaaacaacagaaggaatttgccaagtaaatagatagccagagatggtgctcagcttctataggatccagaagtttctgtgtgccctgggtaaagatgcagaagatagttgattagcaggattgtcaatgcatcactacagaagaggcagagcaaaaaatgtggttgagaacctgtgggcacatggcccaagacagaagtcagttggaaggcacagccccatcttagaggaccagaaaaggctactcacatggaagctggctaacctccttatcagtaatacccagactgagaaggtggaccaggagtttcactagaagcagagcttgataatagaggacacagaagagctagggtaaggtatgaggaccctctcacatctgagccttatggttcccctcaccaaatgatgcagaatttctgtggtcaacaatatccaggcactatcttgggaaagaaaagatgtcagaaaattagacaggctgagcatttacccaaaatggacagttttaaagaaaggaggctctttatcttgaagagaatgagatactcctaattaacaagtttatgtccattcttccctggaaggtaggttcacgaaaatattcaaataatttatagaaactaaagatgctacatattttataaaacctaaagcctagtatataaatatcaaagccatttcacatttttcaaatttattaggagttgcaaagtatttgcttataatttcttttattttttccacatctattgtttatccttcttcatcctgagttttgtgtatttacatttccttccttcgttcttgacaggttaaattagtagcttttctatttataaagtttattttcaaggaattagttcttattttgtatatttattctatttttctactttattaattggtactttcatctttgtttcttttgtttagatgttaattcaacatctgaattcaatattaatttcatttaattattttttgtttgataatgaaagtatgcatttttcatctgagtccagctttttcacttggaggatataaagaaaaattgatttcatttccattcagtcgaatcttattagcacccactcttgtaaataatgtcacttttttgcattacaataaaaaatgtgttctgtattgttttttatattttggatttatttaaggtttcctttgtgacctaacatatggacaaaatttgtaaatatttaatgagtgagaagaaaccgcattcaatatctgtttgctaggaaaagaactaaagaaatacatataaatgaaaggctggatgtgatggctcacgcctgtaatcccagcactttgggagcccgaggcgggcgaatcatgaggtcaagagatcgagaccatcctggtcaacatgatgaaaccccgtctctactaaaaatacaaaaattagctggatatggtggcacgcacctgtagtcccagctactcaggaagctgaggcaggagaatcgcttcatcccaggaggaggaagttgcagtgagccgagagggcgccactgcactccagcctggcgacagagtgagactctgtctcaaaaacaaacaaacaaaaatacaacaagaacaacaacaaaaaagacatacgtgtcaattagagcagttttattctatttttatttctctatggctttatttttttttgtcttctttatcactcaaggatcaagagaggataaagattttcattactattatattttcgtgtgctttcttcattttcctgaaaagaatcttttggcttgactcatgcattttagttacatcttcattttgattatattcttaatcattacaagtgtttttttgccctgaattcaacttttttgttaaaagatggggtcttgctctggttgcccaggctacaatgcagtggcacgatcatagcctagctctctgcagccttgaaaccttgggctcaagtgatcctccgattttaggcataagccactgtgacttttttggtatcatcaagttttttttttttcattgcatttttttacactgatactttttttttttttttttttttgagacggagtctcactctgtcgcccaggctggagtgcagtgatgctatagtgcagtggtgctatctcggctcactgcaagctccgcctcccgggttcacgccattctcctgcctcagcctcccaagtagctgggactacaagcacccgccaccacgccctgctaattttttgtatttttagtagagatggggtttcaccgtgttagccaggatggggcatctcctgacctcgtgatttgcctgcctcagcctcccaaaatgctgggatttcaggcttgagccactgcgcccggccaacactgatacttttaatttcacaggatcacttttaaaaactctgtctcctataaacagcataaagttgttttttatgctacttttttatactactaaaaaagtctactttttacttgatttaagtgaaatcatctactagaggaaaagtagaagatttcactccttttaaattatgcatgtgtatatgtgtggttatagagagagaatacatcttaactagtattctttcatgcttccttggtattttatttgatttctaacttttattatgtagtttcatttattttgtttgctacccacatcatcctctacctaagtaatttggaagttataatttgttttctggtttttgtactattggtaaccttgacatttttaaattaattctgaaacatatatttctcaatcagttccagataaaaaacagtataggtttaatactctcaatttttggtcatgttctaagatttcattttattattgtcaaattatttttgcatcgtgtagcttttgtttcaataatcataataattgcagtctgtttggggcctaaatatgtttttgctttactggacttaatgttgacaattcattgtttatactacatcttctccagttatgcatgacttcatatttggttatatcctttgattagctggattacaaattcaaataaattttttcaaatagtacagctcaaaggatttctctctgttaccattacacttttaagaaaactcagccagatgtagaattattgggtcacacctttcagtcaagtatcaatcaatacattattcttcagtgcccacattgtgtgagtaattgtgctagatactaaaaatacacaaatggtccctgccctcacaaggattatatttaaaaagcaatttcaagagacttaaatatttccaaggtagcatacagagtcaaaggaatatgcaataatttaacctagttttgatttaaccaagtttaaacaatgagagagatattcttcaaagaagtgagatttaagtccagacctagaggatgagtaggagtcagtgggtaaagaatgagaagaagaatgatagaaaagcagacaaatggtttcatttggacaaagggcttgagggaaaaacaggagagctcttctgagatgaagcaatgaggagcacataatatgtagagaatttaacatttaaaaacctactaaaggcatggcacagtggctaacacctataataccagcactttaggaggccaaggtgggtggatagcctggggtcaggagttcaagaccagactgaccaacatggtgaaaccctgtctctactaaaaatacaaaaattagctgggtgtggtggagcgcacctgtggtttcagctactccggaggctgaggtgggaggaccactcaagcctgggaggtggaggttgcagtgaaccgagattgcaccactacactccaaactgtgtgacagagtaagaccctgtctcaaaaaaaaaaaacctacttaaaattaggctactctttattagcagcatgggtcaaccatcctaaacaagatcagtgataaaatacttctccccagacttctagttctagataggacatgtaaagagcttgaaagttgtcacttctggagttaaaacaaggaaaagctagagaaactgaaaatcaattatttttcttgaattgatgtggggctcagaaaatgatattccaaagtatggtgctttggtgtgctgagcacttatgaactaaagaaaattaaaagaccttagactagagcctcagaaccaaggactttctagccttctcctgttcctcctcctaagcacagagtgaaattgtcttccttaggttcatttatctgaagctcctccagaaaaacacagttaccctccaccccctacctgaaatttcattatctaccatatagtagactgaggaatgtaaccacacctggacagacgttatgacaaaatattttctgtctctcattcaaattccaaagaaacaattgcaagctaatttccatctcctgggtccagtcatcctccctaaaattatttatcacccttcaaaaattgtctttcaaagccatcttcctcttccccaattttctttcccctatgaagagggtatatcagcttcagccatctggcccttctttgtgtaaaaagaagtaattcaaaatcaaagctgaactacttacatgacaagggattaataaccagaatatataaggagctcaaaccactctacagggaaaaaaaatctaataacccagctttaaaaatgggtcaaagatctgaataaacacttctcaaaagaagaaatacaaatggcaaacaggcatattaaaaggtgttcaacatcattgatcatcagagaactgcaaatcaaaactacaatgagatatcctctcaccttagttaaaatggcttttatccaaaagacaggcaataacgaatgctggcaaagatgtggagaaaagggaaccctccttgtacactgttggggggaacataaactagtgcaaccactatcaagaacagtttggaggttcctcaaaaaactaaaatagagctactatatgacccagcaaacccagtgctgggtatatatccaaaagaaagaaaatctgtatttcaaagagatatctgcactcctatgtttgttgcagcactgtttacaatagctaagatttggaagcaacctaagtgttcatcaacaaacgaataaagaaaatgtggtacatatacagatggagtactattcagccataaaaacaagaatgagatcctgtcatttgcaacaacatggatagaactggagatcattatgttaagtgaaataagccaggcacagaaagacaatcattgcatgttctcacttatttgtggaatctaaaaatgaaaacaattgaactcagggtcatagagagtagaaggatggttgccagagtctgggaagggtgggaaggtttgggaaagaagtagagatggttaatggatacacaaaatagaaagaatgaataagacctactatttgataacaccacagggtgactatagtcataataacttaattgtacatttaaaaataacagagtataattggattgtttgtaacacaaatcataaatgcttgatggaatgggtactccattctttatgatctgattatttcacattgcatgcctgtttcaaaactcatgtaccacagaaatatatacacctaccatgtacccacaaaaaataaatattaaaaataaatgaaacaaagaaagaaaatcaaagctattggaactttacatgattttgagtcttaaaggaatgtgattatgagacctgagtcatatgacaggcgattgtaatctaagcagctgtaacctaggcagctataacctttgttcttctgattatagatatacatctcttacacaaagtccttatgactatcacattgcctaaaataaaatgttaaagatacccttctacgttggaaaggaaaataaaacaagctaaagcaaattaaattactgtaactcataaactagccttgtatggaaaatgctgtcattctgttcaattttttgctctctgcctatagaagcaatgctttaacttttcagcttcttagtgctgatcccatttatttggcttctgtgttactgagatgtccattcacagcattatgtttgaagaaaatcttttaaactagattctcatcctttcaattatttcttattgacatatggctcctgtgcttctgcacattactaaatttgtatgccttttctcttgctaatctgtccattattagttcatttcagtgaaccttcagagagtagagggaaagccttcctttttcatccctacacaggacaaatcacaacccaaaaatgtggagagagacacagctgaaatctgcacatctaaataagcagaagctgctggagccataacatagtagaaacatttaaatgcttatttgggtgaaatgccagagtctgagtgtggactggcacaagaatgagaggctcctgagggccacaatgttggagggatcctcatatttttataagttttggctctagaaatcttaccacattctcatagtaaacgcacaggaaagatcccctgtggctctagcaggatggagggaagaggggagactaatcatataatccagaacattctccagaaaaaggcctagtctccagggaaaaagacttccagagacttatcctatccatgacaactccagtcccattcactcttgctagctcatgtaagggtggaaaaaagctaagagacatttgtgaaagtcatggtccagggacatcattatacaaaagactgaaatttaattataagattatagaaattcttcttcccatcacttctcagccttttggctaagatcaagtgtagaaattcttcttccccatgcgttataccacactcacagggctccagtgtgatcacagtgaatcacaattgaaagagatccaaggccaagactttttctgaggagactacaggaaagtccagagaaaacagggaagattaaaacagggacatagaatttgaagcttctagaatctataactacaacaaatattaagtacaccccaactgctagccagattaacagaaacgctcatactaaagaccttctacctcatttcctatcgcctgaaacataacatttaatttcagcaaaaaattacagggcataccaaacaagaaagaagaaaaaacaatctgaggagaccgtaggagctaaaggaaagcttctcttccattctgtctgaagttttactgaaataaactaacaataaacaataacatgaaaaaagtacaaatttattaacatgcataagtgtgggagccatacaaaatatgagactcaaagtagaaccagatgattgaagcttaaataacatctttatgcgggggagagaagttaggggttgtaggcagttttacaggaattgtaaataatttttagaggaaatgaatgagcccaaagaacagtcagttgtttgtaaatgattctctttgcacaataaatggaaactaaggacaagcaatatcttgtggactagatacacaaaaatgaggggcagaactgcactatgaacaaaggttgtctgattgtgcagatacagtctcacaggtaatttctcagcgctcccctcagaaaaatagatgaaaaatctttctggatgtgttctcttctcttcttcttagttaatcttttgctattatttaatgagatgtctagggagagagtcttaaaacaattacacttcttttggaaagaagtttcctcagtcagataaagaaattccagattgagctcctccctgcactgagtggtgggtataggaaacaaaagaaggttataaagtttttggttctgaggtagcctctaagactgtctaattttctttaattcaaaaatgctcagcatactgagcaccatacttttgggtatgattttctggaccaaacaagacaaagcaagcaatggaaccacactcagatataatacaaattttgaaattctcagacaggcaatttaaaataattatatatgctaaagacatacataattatatgtctgatggaaaaactagacaacctgaaggaacatatgggtaatgtaagcaaagtgatagaaactgtaagaatcaaaaggaaacgctagaaatcaaagacactgtaacagaaatgaagaatgcttttgatgggctgattaatctggacatagctgaggaaataatcagtgaacttgaaaataggtcaatgaaaacgtcccaaacaaaaatgcaaagagataaagaatgaaaagaaacccagaacatccaaactgtgagacaatttcaagaagtgtaaaatatgtgtaattggaataccaaagggaaaagaaagataaagtgaatcaaaagaaatatttgaagtagtaatggccaagaatttttcaaatatagtgacaaacactaaagcacagtcagaaagctcagagaacaccaagcaggatacttttaaaactacacctaggtataccatatttaagctgaagaaaaacaaagacaaaaggaaacatcttgaaagaaaacagatttaaaaataaaaccttatttatagagaaagaaacataaaaattaaagtagactgctcatcaaaaatcatgcaagcaagaagaaagtggaaggaaatatttaaagtgttgaaagaaaaaaaaccaacaatctcgaactctatatccagtaaaattatcagtaaaaaggaaagagaaataaaagttttcttagacaaacaaaaactgaggtaatttatcaccacccaacctgccctgcaagaaatgtttttaaaaattatttaggaagaagaaaaatggtataggtcagaaacttagatcacataaacaaaagaatagcatcagagaagaaataaatgaaggtgagataaaatattttgttttacttgtttgttaattactctaagagataactttgttaaaagtgatagtaacaatgtattgggtaattactacacataatagaaaagtaaaataaatggcagtgatgtcataagaaatgagagaaaaaaattaggaatacagtagtccctcacatctccattcaaggtttcgctttttgcagtttcacttacctcagtcaactgctgtacaaaaatattaaataaaaaattccagaaataaacaatttatatgacttaaattgcatgtcattctgagaagcatgatgaaatcttgcaccaccctgctgcttctcacttgggaagtgaatcatccctttgcccagtgtatccatgctgtatacacgagccacttgttagtcattgtctgctcctgacattcaaccattaacatcagtatggctcaatgatgcagaatcatccacaccaggtattatcctcctcctccttctgatgtattgtcagaaggtcaattgtagcctaatgctacaaagcctatgtcatccatctcacttcatctcatcacataggtattttatcatctcacattttcatcacaagaagaagcatgagtaaaatacactaagatattttgagaaaaagaaagagcacattcatctaacttttattacagcatattgttataattgctctattttattgttagctatagtttttaatctcttactgtgcctactttataaataaaattttatcataggtatgcttgtatagaaaataacatggtatatataggattcagtactatctgcagtttcatgtatctgctgagggtcttgaaatgtagcctccacgaataaggagaaacaattgtattgttataaggtgcctgcactatatgtgaagtggcatagtattgttcaaaatggacttagattacctaataatgtatattgcaaattctagggccaccactaaaaaaattaaaaagaagtataattgacatgctaagagataaaatggaataatataaaatagtcaaccagaactagagaaagcagaactagaagaggtaagaaataaaaaacaaatgcaacaaatagaaaatgtaaacacaggaaagataattaattcaactatatcaataatcacttgtgtgaattatataaatacaccaattgaagacagagactatcagagtggataaataaacaagacccaatcatatgttgtctacaagatattaaatttaaagggtcaggtaaacataaaaggatggagaagagtacaccatgccagtagtcatcaaaaaaaaaaaaaaaaaaaagctggagtagctacattaattttggacaaagcacagaacaagaaaaattatcacagataaagagagacattacataataataaagaggataattttccaagaagacataatcctaaacatatacaaacctacaacacagcatcaaaaaaataagaggtaaaagtggatagatgtaaaaagagaaatagacaaatacactatcacagctgtaaacttcaatacatctcttttgatgattgacagattaagcagacagaaagtcagtaaagatataactaacctgaacagcactattgatcaacttgatctaactgacatttgtagaataatctaccccaaaacagaataatgcacagtcttctcaagtttacatgtaacattaactaaaatagaaaacaatcttggccataaaacacaccttaacaaatataaaagaatagaaatcatgcaaagtatattctcaaaccacattggaattaaactgtaagtcaatattagaaagataactggatgatccccaaatacttggagatcaaacaatatacttctaagtaacacagagatcaaagaagaattctcaagaaaaaatttaaaatatttttaactaaatggaaattaaaatacaacttattaaaattcttagtatactgcaaaaacagtgcttagaaggaaatatatagtactaatgcatatattagaaaagaagaaagatccagaattgataacctaagtttccacttcaggaaactagagtaaggagagcaatttatgcctaaagcaagcagagtaaaagaaataataaaagagcaaaaattaataaaattaaaaatgggagaacaatagagaaaatcaacaaaaccaagggctggttctttgaaaagatcaataaaaatgatcaatctctagctaggctcaccaggaaaagaagatagaaaaaataagttatgagtattaaatatcaaagaaagatcatcactatcaatcccctaaacatttaaaaacttctaaagaaatagtatgaaaaaagagaaatagtatgaacaactctatgcttgtaaatattttttatttttattttagagatggggtcttgttttgttggctaggttggtcttgaactcttggcctcaagcaatcctcctgcctcagcctcccaaagtgctaggattataagcatgagccaccgtgcccagctaatgcttgtaaatttgataacttagatgaaataaatcaatccatttaaagacacccactaccaaaaattgcataagaaaagttagataattggaataggtctatgtataccaaataaattaaatcagtaattagtaacctttcaaataagaaagcactgggcccagatgttttcacttgtgaattctacccaacaattaagaaaggaagaaattgaaagagtcgggatgatcagggaatcatccaattctctacaatctcttctggaaaattcaagtggtggaaattttctagctcattctgtaaggccagtattaccctaataccaaaaccagatagacattacaagaaaggaaaactacacacacatacctctcattaacacaaacacaaaaatttcaacaaaatattaggaaatttaattcaatagtgtatataaagaattacatactaaaaccaatgacttattccaggtaggcaaggctggctcatcattgaaaactaaaaaaatgtaatctatgatatcagtagctaaagaagaaaattaatataactttagcatttgatccagagaaagcacttgacaaaatccaatacccatttacaatttttaaaactctcaacaaattcacaataaatgggaacttccttaattttataagtaatatctacaaaagacacttaaaattataggtctctatgaagtttggtgaggtcctcaaaaaaaaagaaaaaattacaggtcaggcatggtgactcactcctgtaatgctagcactttgggaagctgaggtagaaggattatttgaggccaggaattcaagaccagcctgggcaacaaagtgagacccccttctctacagaaaaatttcaaaattagccaggcacgaaggcgtgtgcctatggtcccagctacatgggaggctgaggctggaggagcatttaagcccaagaggtcgaggctgtatgaactatgttcatgccactgcattccagcctggccaacagagtgggaccctgtcttaaaaataaaaataaaaaaatatgctgaaaggtgaaaaactgaatgtttttaccctcagatcaggagcaaggcatgaaggcatgaatgtcctatctcaccatcatatcggagatgtacctatttgacattgtatggcaggaccaaccgactacaatatgacaagaaaatgagataaaatacatacagattgtaaaggaagaaatagaaaactctgtctttttttttgcaaatgacataattgcagatatagagaatcccaaagaacacacacacacacacacacacacacacacacacacacactacttctggaactaataagtgattatagcaaggtttcaagatacaaggttaacatataaaattaaaatgtataaaattaaaattaatatatataattgctgtcctgtataccagaaatgaacaataggaattaaaaatttttttaaccatttgaaataattacaacaaaattgaaatacttgggtgtaagtgtaacaatttatgtaatttatgtgcagtctatatgtggaaattacaaaattctgtgaaaaaaaattaaaggtgaccgaaaagagtttgaaaaaaaaacctttaacaaaaaaacacaaaaagtctaacttaatggagaaatattctatgttcatatattaaaagactcaaaattgttaagatttctcctaacatgatctatagattcagtgtaatttcaatcaaaattcctgcaatctatattgtagatattgatgaaatgattctaacttttttttaaagtctttctttttttttttttttttttttgagatgaagtctcactctgtcgcccaggctggagtgcagtggcgcaatctcggctcactgcaagctccgcctcctggcattctcctgcctcagcctcccaagtagctgggactacagacgcccgccaccacacccggctaactttttgtacttttagtagagacagggtttcactgtgttagccaggatggtctccatctcctgacctcgtgatctgcccgcctctgcctcccaaagtgctgggattacaggcgtaagccaccgtgcccggccatgattctaacatttatacgaaatgacaaacaaacctataacagcaaagacaatactgaagaagaacaaagttggaggatgcacactctctgatttcaagtcattctacaaagtgactagtaaccaaaacagtgtgatattggggaaaaaaaaaaaaatagacacatagatcaatggaacagaaacaacagagcccagaaatatgcccacacaaatatcatcaactgatatttgacaaaagagtaaaggcaatcgaatagagaagtctttttaacaaatggtgctgcaacaatttaatgtccacatgtaaaaataataaacctagacacagaccttacaccttacataaaaattaactcaaaatggatcataaaatgtaaaacacaaaactatataactcctagaagttaatataggagaaaatataggtgacctttggtttggcaatgaaatttttgataaaacaccaaaagaatggtccatttaaaaagttgatgcattggacttcattaaaatttaaaactactgctccatgaaagacactgttaaggggctaaaaagataagttaaagacaggaaaaatatttgcaaaaacacatttctaagaaaagatttgtattcataatatatgaagaactcctaaatgcaacaataagaaaacaactgtattttttaatgggcaaaagatctaaacagacccctctccaaagaaggtacagaggctgggcgtggtggctcaggcccgtaatcccaacactttgagaggctgaggggggtggatcacctgaggtcaggagttctagaccagcctggccaacatggcaaaatcccatctctactaaaaatacaaaaattagccaggcaggatggcagatgcctgtaatcccagctactcaggaggctgaggcagggaaaaatgcttgaacccgggaggcagaggttgcaatgagccgagatcatgccactgcactccagcctggacaacagagcaaggctctgtctcaaaaataaataaatgaataaataaataaatgaataaataaataaataaataaataaataaatgaaaaaattaaaatacttctgttctaggatcctttccagaatacattatgtttaatcatcatgtttccttaggatcttttggatgtgacagtttctcagactttcctagttttggtgacctttacagctttgagaagtactggtcagttattgtaaagaatgttcctcaactggaatttgtttgatgtttttcttatgattagacagggtttatgggtttttgggagcaagaccatagaggtaaagtcacattatatcaaagacacttgctagcaatatgacttgggtgttgagactttgatcacctggctgaggtagtgtttgtaaggtttctacactgtaagttttcttctccccatcacccctcttcccatactgtattctttggaaagaaattactacgcccagtccacacttaaggagtgaggaatcatgtttcacctccatgaggtgggagactttaacaccccactgtcaatattagacagatcaaagagacagaaaattaacaaggatatccaggacttgaactcagctctggaccaagcagacctaatagacatctacagaactctccaccccaaatcaacagaatatacattcttctcagcaccacattgcacttattctaaaattgaccacataattggaagtaaaacactcctcagcaaatgtaaaagaaaggaaatcataacaaacagcctctcagaccatagtgcaatcaaattagaactcagtattaagaaactcactcaaaaccacacaactacatggaaactgaacaacctgctcctgaacaactactgggtaaataatgaaatgaaggcaaaactaaataagttctttgaaaccaatgagaacaaagacacaacataccagaatctctgggacacagctaaagcaatgtttagagggaaatttatagcactaaaagcccacaggagaaagagggaaagatctaaaatagataccctaacatcacaattaaaagaactagagaagcaagagccaacaaattcaaaagctagcagaagacaagaaataactaagatgagagcagaactgaaggagatagagacatgaaaacccctcaaaaaataaataaatccaggagctggttttttgaaaagatcaacaaaatagaccactgccagactaataaagaagaaaagagagggccgggcgagatggcttatgcctgtaatcccagcactttgggaggccgaggtgggcagatcacgaggtcaggagattaagaccatcctgactaacacggtgaaaccccgtctgtactaataatacaaaaaattagcagagcgtggtggtgggcacctgtagtcccagctactcgggaggctgaggcaggagaatggcgtgaacccaggaggcggagcttgcagtgagccaagatcgtgccaccgcactccagcctgagtgacagagcgagacttcgtctcaacaaaaaaaaaaaaaaaaagaagaagaaaagagagaagaatcaaatagatccaataaaaaatgataaaggggatatcaccactaatcccagagagatacaaactaccatcagagaatactataaacacctctactcaaataaactagaaaatctagaagaaatggacaagttcctggacacatccaccctcccaagactaaaccaggaagaagtcaaatccctgaatagacaaataacaagttctgaaattggggcagcaattaatagcttaccaaccaaaaaaaatccagaaccagacgattcatagtcaaattccaccagagttacaaagaggagctggtatcattccttctgaaactattccaaacaatagaaaaagagggactcctccctaactcattttatgaggccagcatcatcctgataccaaaagctggcagagacacaacaaaaaaaaagagaatttcaggccaatatccctgatgaacatcaatgtgaaaatcctcaatgaaatactggcaaaccaaatccagcagcacatcaaaaagcttatccaccacgatcaagtcggcttcatccctgggatgcaaggcgggttcaacatatgcaaatcaataaacgtaatccatcacataaacagaaccaatgacaaaaaccacatgattatctcaatagatgcagaaaaagccttcaacaaagttcaacagcccttcatcctaaaaactctcaataaactagatattgatggaacgtatctcaaaataataagaactatttgtgacaaacccactgccaatatcatactgaatgggcaaaaactggaagtattccctttgaaaactggcacaaaacaaggacgcccttcctcaccactcctattcaaaatagtattggaagttctggccagggcaatcaggcaggagaaagaaataaagtgtattcaattggaaaagaggaagtcaaactgtctctgtttgcagatgacatgagtgtatacttagaaaaccccatcgtctcagcccaaaatcttaagctgataagcaactttagcaaagtctcaggatacaaaatcaacgtgcaaaaatcacaagcattcctatacaccaataacagacagagagccaaaccatgagtaaactcccattcaaaattgctacaaagagaataaaatacctaggaattcaacttacaagggatgtgaaggacctcttcaaggagaactacaaaccactgctcaacaaaataatagaggacacaaacaaatggaaaatcattccgtgatcatggataggaagaatcaatatcgtgaaaatggccatactgcccgaagaaatttatagattcaatgctatccccatcaagctaccattgactttcttcacagaattggaaaaaactactgtaaatttcatatgaaaccaaaaaagaacccacatagccaagacaatcctaagcaaaaagaacaaagctggaggcatcacactacctgacttcaaactatactacaaggctacagtaaccaaaacagcatggtactggtaccaaaacagagagatagaccaatggaacagaacagatgcctcagaaataacaccacacagctatgaccatctgatcttttgcaaacctgacaaaaacaagaaatggggaaaggattccctatttaataaatggtgctgggaaaactggctagccatatgtagaaagctgaaactggatcccttgcttacgccttatacacaaattaactctagatggattaaagacttaaatgttagacctaaaaccataaaaaccctagaagaaaacctaggcaataccattcaggaaagaggcatgggcaaagacttcatgatgaaaacaccgaaagcaatggcaacaaagctaaaatacaaaaatggaatctaattaaactaaagggcttcttcacagcaaagaaactatcatcagagagaaaaggcaacctacagaatgggagaaaattttcgcaatctatccatctgacaaagggctaatatccagaatctacaaagaacttaaacaaatttacaagaaaaaaacaaacaaccccatcaaaaagtgggcaaaggatatgaacagccacttctcaaaagaagacatttatgcagccgacatatgaaaaaatgctcatcatcactggtcatcagagaaatgcaaatcaaaaccacaatgagataccatctcacactagtttagaatggtgatcactaaaatcgcaggaaacaacaagtgctggagaggatgtggagaaataggaatgcttttacactgttggtgggactgtaaactagttcaaccattgtggaagtcagtgtggcgattcctcagggatctagaaccagaaataccatttgacccaacaatcccattactggttatatacccaaaggattataaatcattctactgtaaagacacatgcacatgtatgtttattgtggcactattcacaatagcaaagacttggaaccaacccaaatgcccatcaatgatagactggataaagaaaatgtggcacatatacaccatggaatactatgcagccataaaaaaggatgagttcatgtcctttgcagggacatggatgatgctggaaaccatcattctcaggaaactatcacaagaacagaaaaccaaacaccacatgttctcagtcataagtgggagttgaataatgagaacacatggatacagggagggggacatcacacaccagggactgtcagggggtggggcactaggggagggatggcattaggagaaatacctaatgtagatgacaggttgatgggtgcagcaaaccaccatggcaagtgtatacctatgtaacaaacatgaaagttctgcacatgtaccccagaacttaaagtataatttaaaaagaaaaagaaaaaaaaaaagaaatacctcagactggctttctgatcagttgttttcctgcacaggcaggccataggcagccatggtgcccagccataatggcatgatctcgaagccccacttccgcaaggactgctagcaatgtgtggccaagtggttcaaccagctggcccattagatccgcagacgcaaggcccagcaagcaaaagcacaccgcactgccccataccccgagtcaggacccatccagcccatcatgtagtgccacactatacactatcacaccaaggtgtgcatcagccgcacttcagcttagaggagctcaaggtggcaggcattcacaagaatgtggcccaaaccactggcatctctattgattggaggaggcggaacaagtccactgagtccctgcagggcaatgtgcagcggctgaaggagtacaattccaagctcatcctcttccccaggaagcccttggcccctaagaagggagacagttctgttgaagaactgatattggccatccagctgacaggaccagtcatgcccatccagaaggtctataaaaaggagaaagccctagtcatcactgaggaggagaagaatttcaaagccttcgcgcatctcctcatggcctgtgccattgcccagctctttggcataaaagcaaaaagagccaaggaagctgtagaacaggatgttgaaaagaaaaaaataaagccctcttagggatttgtaataagtcagcagtaatgctgcgggaggaaaaaaaaaaaaaagacatatctgagactgggtaatttataaggaaaagaggtttaattggctcatggttccacagactgtacaggaagcatggctggggaggcctcaggaaactcccaatcatagcagaaggtgaaggggaagcaggcatatcttacacggctggagcaggaaaaagagagaagggggaggtgctacacactgttaaacaaccagatctcatgagaactcactatcatgagaacagcatggggcaaatccacccccatgatccaatcacctcccagcaggcccatcctacaacattggggattacaatttgacatgagatttgggtggggacacatatccaaaccatatcacttggattgggtttcaatgtactcctgtaactcagtgatctttgttcctatccgtattctgaatactgtttttgtcatttcagccatctcagcccagttcagaacccttgctggagaagtgatacagttgtttggaagaaaaaaggcactctggctttttgagttttcagggttcttgcactcattctttctcatctttgtgggcctatctaccttcaatctttgaggttgctgactttgggatattttttccttttaacctatttgatgattttggggctttgattgtggtataaggtagattcagctgactggctttatttctgggaaattttagaaggccaatgctcagcttccaacttccggactgcatgctgtattctgggggacttgtattggttcccaactttgttctctggctccctgaggttaggaatccactgtgctgtgggtggcacaggagacaaggtacagcagctgcagcagagtgctagtgggtgccagggtgcctgccttcctgcaggtgatcaccacagtgggagaggcaatgcagctggggagtcagtaggtgttgggggccctgctggcaactgtgtgtgcagctgcactggtggcggtgttagctcaggtgcaaggtgctggcaaatgcaggtctggttgccttctctgtgctctgcaaacaggagggatcgctcagtgttgcagaggatctgctgatctctcatagtgttagcacgagagtgggcactggtgggggaagggctggctggctctgtgcccaccaaggctctctctgcaatggcagttggtggggatgggaggttggactgcactcctgcacactggtgggcaaggaaagcaaacctgcctctgcagacattgccagcaaagtgatgtggggagttgccatgggcctggggggatgctgcagtatggggagggagcaggtgggctggtgtgtggccataggggctgcccggctggagctgccagtcaggcatggtcttccaggcacagaagcaatggtgtgggccgccagggcactagagactgctctgcaagcaggtgtaaccaggctggggctcctagagagaccagcagaccaaggggtgctcaggttggaccagccccacctgatggggaagaccaccctgcagagatcatgtctgacagttcccctagggctaaagtcttctatgggagcaagttgagcctaggatggccatccctggccatgttccactacagacactcctgcagtataccctctgtgctccacaccaatggcttgctgcccctaccccttctctaagcagctctccctgccaactcgaatgtctgtgatggtgaaggggtcttctcctacaggggttccagaggcccatggcaacagtgggttgttccttgacaattcaactcacctgatcccccagagccattgtgggccaggaacaaaacctggtgtgcagtagtcctgtgccacattcccagctttcactaccttcagcccagcttctgtgtcttctctctgtccactcctggtttcttccctctgaagatctgttaggggcattccagtcatcttggtcccgcagtgggagctcttccacctggctgtgtctagtcagccttctgagtaagatccattcctgactccttttctttcctattcctcttcttccagataagataacattctattagccaagagaagtcagcaaaaaagggggggaaaaaaacaaaataatgaatttggcaaattgaaagcaagtaacaaaaatgatagacttcagtccaaacatatcaataatttcattaaatgtaagaagatacatataggttaaaaagaaaaagataaagatatatcatgtaaatggtatgcaaaagaaagctgaaagttttattaatattaggcttaatggacctcaagacaagaagaataaagacagaagagatattttaataaatggatcaatccatgaagaagacttaaaaatcctaaaatgtaggtagcttaataactgagcttaaaaaattgatgaagcaaaagctgactgaactaaagagacaaatagacaaattcacagtcaaaagtagagatattggctggacacagtggctcactcctgtattccagcactttgaaggatgattgggaggatcgcttgaggccaggaattcaagaccagcttaggtaacatagcaagactccatctctacaaaaataaaaataaaaacttagccagatatggcaggcggcacatgcctgtagtcctagctacttgagagtctgaggcagtaggatcacttgagcccagaagggtgagactgcagcgagtcatgatcatgccactgcaccccagtctgggtgacagagtgagacactgtatctaaaaaaaaaacaaaagtaaaaataaaaagaagtggggatattaattttctttttaataattagataaaaatcagtaaggatatagaagatcttaaaataattatcaaccaccctaacctaactgaactttataaaacaatttacccaacaactgcagaattcacattctttcttgtgcacacagaccatttgccaagatggaccttatcctggaatgtaaaacaagtcccaatatattctaaaagcttgaaattttccagagtatgttctctaaaaaccaaaattaaatcagatattaataacaattgaagatttttgaaaagcctcaaatatttggaaattaacaaacttttagtaactaggcaaagaagaaatagtaagaaaaattaataaatatttgaatctacataataataaaaatatatcaaaatttgttggatagagctaatgagtactattaaacaaaaattacaggaagctattgctctggactaaactcctccactaggccccaacaaagtagagtaaaaaatcacaacgaagccagtgatcaccgaactgaaactgagctgctcttgttgctatcagagttatcaggagagagagatagcctaacttcccaaacaggccagttttaatctttaatcagcatgataatgaagttccctctgttttaatcctacaataaagaattacccaagtaacttgatgttaaccaatcagccatctttctcttgttctgaccgcttagcccttccctaaaaagaaagtaactttgaaatggccaatccactatttgttatttgtttctgctttcttcagtcctcttataaagccaacctcttctgctgtatacatgagagcacttagtctatttcatggaataaattgttacctgaaatttatctttgacagtacttagaggaagtttatcaattgatatacaaaatgacgtacaacaaaatcaatttttttctcatcaatgtgttaatgaaatgatgttgaagaaaacaatgttttcggaagatctgctgtacattgtttgcttaaagttgcagttccgaagaacctattgacatgttaagtgaggacttactatatcttcaagttcactaactctttactctgccagacaatctaccattgagttcctgcggtgaattttatttttcttcttgagcagccagaaaagacttccagggaatttttttatttcagttacttttcaactccaatatttccatttggttctttacagttcctatctctttattgttattctctatttaatgtaacattgttatatcttcctttcctttttttttctttttaaattcaagacagagtctcactctgtagcccaggctggagtgcagtaggctcaatctcagctcatctgcaacctctgtctcccaggttcaagtgattctcatgcctcagcctcctgagtagctgggattacaggtgcctgtcaccatgcctggctaatttttgtatttttagtagaaatgggggtctcaccatgttggccaggctggtctcgaattcctgacctcaagtgatccacttacctttacctcccaaagtgttaggattacaggcgtgagccaccgcacctggcctatcttcctttacacctttaatcatattttcctttagttctatgaacatatttataatggctagtttaaagtatttttctgttaaatctgacatctagttgctcttatgggcagtatttgttgcatgtatgcactagaatttcccgtttcttcgcacacctcataattttgttagcagtggcaaatccatatgcaactcaatttttgcctccttggaggaaagaattagactgcggggcataaggcagagtgagagattgaggcaagttttagagcaggactaaaggtttattaaaaagttttcagagccaggcatggtagctcacgcctgcaatcccagcactttgtgaggccgaggcgggcggatcacttgaggtcaggagttcaacaccagcctggccaacatggtgaaaccccatctctactaaagacatgaaattagctgggcatggtggcacgcaccagtaatctcaactacttgggaggctgaggcaggagaattgcctgaacctgggaggtggaagttgcaatgagccaagattatgccaccgcactccagcctgggctacagaaagatactctgtctcaaaacaaaacaaaacaaaaaagttttcagagcaggaatgaaaggaagtaaagtacacttggaagagagccaagcaggcaaattgagagatccaagtgcactgttcagccattgacttggagttttatactttggcatggtttcagagtttgcatttcttctcccttgatttttcccttgaggtgggctgtccacatatgcagtggcctcccagcatttgagaagggctgcatgcgcagtgtgtttactgaagttgtgtgcatacccatttgacatgtttttcccttaccagttgagtgttcctagaggaaggtcatataccagttaaactccaccattttgccttttagtgcacatgcatgagcccacttgcctaatcctgagagctcatcaggaagctgctgatgaccagcttcaggttttttttatctatcgggacactgcctttccctggcactgggtgtgaccaactactattttcaatagtcagtttaacaagttccctaccatcatttgatggtcacttgacattcctaagggtggagggccctcttttgccctgctcatgtttgcctagctatctactcttaacaattttttgttggaaaacagaaatttttagataatatattttagcaatggttatactgccccaccttctgttctgggacttgttattatttgattttttttgtgtgtaatgattatttggattatttcagtgaaatctgtgctcctccaccacacatatatgcacgtgcacccccaaagcaacacacacacacacacacacacacacacacacacacagtgttaaaactctgatcttgctctttagggaggtacagctttaggtatgcccaaccatgaccctgggatgacagttgcttgctttctttcttcgaccatatccagctgttaaattccactaattgctgtctgattgctctattgttttcaacaatgtcctgggaggcataaattgctctacaaactaatccaatcaaatgtggctcctttaaagtaatggtttttaaggacagtgtaatttttctgaccccaaaaagactccttctggctgttttattcccaatcccttcctaattgtttttcactacacctccactgtttatgctcttagccttgaacttctctagctgctttacaaatgaagtaaatttccttgggaagagattagaagctatctgttttatggctttcctctctccccaggccaaatttctgattggtgctggggacaatagcaagcttctctctgagtgatacccttgccctgggagttgagtgcttggtgaagtgggggcaaggcagcagcctgaggtcctctcaagaactatggggccccagtattctcagtgcactgggaccaaggcctggattgttcttgtcaaagacaaaattacaacaaatttagtttagagatcttaattagctctatttgtaattcgagaatcaggcaacatttcatttccattggaaagtcttccaatgaactgagcagaagaggttggttttatagacagagaagggctgaagaaagcagaagtaaagaatgacacatgtgttatttaccattttttctctagagacaggatctcgctatgttgcccaggctggagtacagtggctactcacaggtgtgatcatagtgcactataggctcaaactcctagtttaagcaatcctgcctcagcctccccagtagctggagctacggtcacatgccacagtgtccagcttagttactttttaaagttactttttcaagttactttttcttataaggcaaggacagggtgacagaacaatttaaaaaaaaaaaagcagagagaatgtcattatcatattgattaaagatataaactggcctacttaggaaattagctgttatctcactctcctgatttcttggaaggtcagatggcaacttcattgaggtgtaatgatgtggaactttagcatgggtgactctgttttgatttttagtctgatctgttggggcctagtatagaagcttagtccaaaacaatggtcttctataatttttatttgacattcattttcttttgttttcctgttttgggtttttctgttttgttttgttttgtttttttgagacagggtctcactctgtcacccagactggagtgcagtggtgtgatcttggctcactgcaacctctgccttctgagttcaagcaattctcctgcctcagcttcccaagtagctgggattacaggcatgcgccactatgtctgggtaatttttgaattttttggtagagacggggttttgccatgttggccaggctggtctcaaactcctgacctcaggtgatcggcccacctctgtctctcaaagtgctgggattataggtgtgagctgccgtgcctggcctttatttgacattcttaactcacacaatagcctttactttccaagttagtagtcatttgtgcgtcattgtcatagcagtaccacagacactcacacatgttcctttgatattaatggaacatttcagttcattgtttcttctgcctactgcaatcaggacgtccacattttaaaattattccctcctaacaataaaaaattatttagttaccttcctgtaagttgaaagaagttggccttcctgccattttcctttggaaaatatgaaataattatatcttaattcatatgcaaggctttttattttttatttgtttaccagattgaggtttaaccctcctcccgggcttaattatggtcatccacccctagaagataggcctttctgagatttattccaattagaaaaaaatgtaacacttgttacacatttggtattcattgaagagtttctctagggtagcatgatccctgaactctgaaaactgaagtagggttgtggaaactgaagagtgaattttttttttcttttttctttttttttttttttttgacaggagacagggtctcactctgttgcacaggctggagtgcagtggtacaatcatagcttactgcctcaaactcctgggctcaaaaaattctccacctcagcctcctgagtagctgggactacaggcatgtgccaccatgcctggctaacctttaaattttttgtagagacaggggtctcactatgttgcccaggctgctcttgaactcctgagctcaagtaatcctcttgccttggcctctcaaagtgctggaattataggcataagccactgaacccagccaacagtgaattctttatgtacaagtttcagtttgaaagggtatgaattaatataggagaattgaactgtagggagaaagaatacacaattactctgacactgaaaccactctacccagtgattaagaactgtctggagatcttttggtcaagaatgagcctgtgagctccaagattcaaatggcgaagctccttttgccgtccttgcaaacacatgacaatgaaaaagtgcatacaaatttaaaggacttagctcagctaaaaaataagaaaagcatttccttgacttgaacagatgaggacacagatctgcctatctgaagctacagatctgggctatagaatcagaaaccacatagatgacaagagtacaatttctgtggggcaagtggagttttaactagtggcaggcaccaaagtcaggctcacagtgtaaaactggatattaacaagaggcttgcttcttatatatttagatttaaaagggttttggcctatgtccagggcttatagttcacatctggtagcttcttggattaggagaaatgaggtaaaccattgttctcctggcaggatatgagtcttatccattgattaatgtaagactctcttcaaattggggacctggggaaactggataagtcacaagaaatctgccaaatataagaacgtaaacatggggataagaaaagcaagacaaacacaaaacagaaaagcctgctcctcaaactggacttttacaaggatatttctgtaggtcataggtacattcactatcttgattgtggcaatggttttgcaggtatatacatgttaaaactcactaatcactaaatatgggtagttcattgtatgtcaatttttactcaataaaacctttttaaaaagtacttacaaaccagttttaaattagtaaaaataaattcatcataaaataggtaatcagctctaataccaaaaaattctatctagaaatgaaaaacaaaataattttctgaaaataagtatgatatgagaatgcttaaaatcttcaagaaggaaagaaataatatacagaaagcaagaacaaggaaataatgaaataacaacaagaaaaaggtggatatcaatccaagagcaggaagattaaaaaaaattattaaaaaatctggaaatgtaaaatatagccattgtgattaaaacacaatagaaataataagtgctatactaaataaaatctaagaattagtaaactgcaaaagtattaagacaattacctgaaacatagcttagaaaaataaagaaataaaacacctgaaaaaggaacacatgagaaatagagaatacatagaggaattctagaaggaaagaattggggcaatgaaggaggagtgtaatttgaagaatagctgaattaaagaaaaatgtgcatccacaaattgcaagggcatactgaccagaattaaataaataaattcacagataaacaaatgtagaaaattaagaataaagaagaattcatagattaaaaaattggaggtgggtggaccacttgagctcaggagttcgagaccatcctggacaatgtggcaaaaccctgtctctacaaaaatcacaactagccaggcatagtggtgtgtgcctgtagttctgttaccagaaaggcatcctgatctaaacccccagagaggttcttggatctcacgcaagaaggaattcagggtgagttcatagagtaaagtgaaagcaagtttattaagaaagtaaaggaataggctcttgagctgcttgctcgagcctgtctgactctgtagagtgtacttccatttcaatatatctgtgcttttcttatgttaaaaaaaaaaaaaaaaccgctttgggaggccaaggcaggtggatcacctgaggtcaggagttcaagaccagcctgaccaacatggtaaaaccctgtctctaccaaagacacaaaaattagccaggtgtggtggcacatgcctgtaatcccagctacttgggaggctgaggcaggagaattgcttgaacccgggaggcggaggttgcagtgagccaagatcacaccattgcactccagcctgggcaatagaatgagactctgtctcaaaataaaataaaataaaataaaataaataaagcaaaggaataaaagaatggctactctacaggcagaacagtggcatgagctgctggttgcccatttttgtgattatttcttgattatatgctaaacaagaggcggattattcatgagttttctaggaaaggtgtgggcaatgcccagaacttagggttcctcccctttttagaccatccaggataattccctgacattgccagggcatttgtcgtggcgctggtggggagtgtctcttagcatgctaatgcattatagctagcgtgtaattaaccatgaggatgatcagaggtcactcttattgccatcctggttttggagagttttggcaggcttctttactgcaagctgttttatcagcaaagtcgtttatggcctgtatcttgttcagacctcctgtctcatcgtgtgactaagaatgccttaacctcttgggaatgcagtccaataggacttagccttattgtaccaagcccctattcaagatggagttactctggttcaaatgcctctgagcattttagctactctggaggctgaggcgggatgactgtttgggcccaggaggtttaggttgcagtgagctgtgatcccgccactgcactcaataggacagagtgagatcctattttctttacttctgaaaagaaaataaaaaacaaataaacaaaagaatgaaaataaacgagctaactgacagtttcagaagaataacagaataaacccaaacaatgtaaatgttaattctttatttaaaattttaaggaaaaaaccccactaccacacttaaggctaatgggaaatggcatccaattaaacatagaaatatgtagcaagaccaaccaagggaaaaaagaaggaagaatgcacaaataataaaattatatatgcaaagtggaagagaaaacagcataaaatacagaatcaatcagtagaggttttaaaaaccataaacagaccaggtatggtggctcatacctgtaatctcagctctttgggaggctgaggcaggtggaaagcttgaggccagcctggccaacatggtgaaaccccctctttactaaaaatacaaaaattatcctggtgtggtggtgcacacctgtagtcccagctactcaggaggttgaggcacaagaatcacttgaacccaggaggcagaggttgcagtgagcagcgattgtgccactgcactccaacctgggtaacagagcaagactgtgtctcaaaaaaaaaaaaaaggcaagttaatgtcaataaattttaaaatttagatacaataaactgttttatagaaataatacattgaataccaaaataaactggctaaagaaatgaactgaatagctcttccaaagtataaaaaaaaagataatatctttcttatataaactttcagaaaagagcggaggaaaataaagttactccactcattttacaaggctaatataagcttgatatctaaaccagagagaaacagcctaagaatggaaaggtgtaaccaacctcacttgtaaacacagacataaatatgttaaaatataagaaaagtgaatgagtagtacacttaaaaaattattatgatgaccaggtggagtttattttaggagaaaaaaagatgtaatcgactaaattaacagattaaaaaatatgataagttataagcaaaaaagcctttggcaatatacacctcttattcttgatagaaaatcctacagcttggaaacaatcgaacagctttaatctgaaacctacaacaaaaggtatacacacagtataaagaaaaaactatagaagcatttgcactaaaatcagtaacaagaatgctctctatagagcaggaaaaactatttgcaattcacaaagagccaatttccctaatatttaaagagctcctgtaaatatatacagcatttctttctccaattagaatgaactcttcttgaagttggaaacaatccttatttactattcacccccaggacatgagatagtgcggggcatacagaattgttacacgttgttacataaatacataattgttaaataagagttgttccttggtattctcaggatgtattagtccattttcacattgctataaagatactaccttagactgtgtaatttataaacaaaagaggtttaattgactcacagttcagcatggctggggagacttcaggaaacttagaatcgtggtggaaggggaggcaggcaccttcttcacaaggcggcaggagagagaaagaagtccaggggaaactgtaacttataaaaccatcagatctcgtgagaactccctcagtatcacaagaacaatatgggggaaaccaccccatgaccaatcacctccaaccaggaccctccctcagcacctggggattacaattcaagatgagatttgggtggggacacaaagcctaaccatatcacagggggactggttcccgaagccaagcgtataccaaaatctacaaacactcaagtcctgcagtccaccctacagagcccacatataggaaaattcagcccttgtgtacctgggtttcatatctggcgaataatgtattttccaaacacatttggttgaaaaaaaatccatgtataagtggacccttgcagttcaaacctgtgttgttcaagtatttgttgaatgtagtagactgccaaaatagctttttacttcttgtaaggacaagagtgatgccttccaagctctttacacttcagagttgaaaccagaaggtgaacaagtttttggacactttgcttacaagtaaagttttttaaaagtagaaagagccaggctgagtggtgcatgcttatagtttcagctactggggaggctaaggtagaaggactgcttgagtgcaggagttcaaagctgtatgtgttgcactatgattgcatctgtgaataggcactgcactctagcctgagcaacatagcaagactctctcttaaaaagacaaaaaagaaacccctaaaaactgaatttttttttaaaaaaagtggaaagtgtggcttcaggcaaaaagtaagtaatgttaacaaattccttgtatttgaaaggaagccttggaagcactgatagggatctattcagactccagctgtcataactcccaggcctgtagtaaaagtttcagcttaaaagccaagccagccataccttctcatttctcagcattgtctaagtgtcagtctctttgaatcattttctaaacttgctagacaaattctaaaagggctgtaacactctgaataatgttttctgatgaccaggacatacagaccatgaggcaactgtagcctctgtacagaaagaagaaaattttgatcaattggaacaaaatgccccttaataaaattttggttaagctctctccttcctccagacccctaaattttgccccaccattatcctgaaaaagcatacagcccctccggagaataaactggcctccaggtaaaatagtctctgatctatctgatcacgtcacccgtttgcctcacttccccatacctggttctttctagctttgtttactccttataaaagaaaaactcttttttcctaaatctcaagtcacttgtagacctgtggtcaaagcatttttcccactacgatttttgccccctaatgcaataattcttttgaataaagtctctccttataaagtctggatttgacttttattccacagtctccctaataatttatctttctattgcctaccctgtgatatcccaagcctaagggtttcaggttttatgattaaccttaatactcaagataaaatgatgagacaccacatggagcagattgctgctgttgcacctgaggtccttgtagacccattagcctccagccaatccagcagcagattacagacatagaagggagtcccagggagacctaaaggatttcccatctgagctcagtaaaaattgccaaagtgtggagtcatgaactatataagagaatgttgtttaagcctctaagcttatgtatgcttgttatgcagcaatagattaagggtatattgactgaatatatgaatgaatgaaagaatgaacaaaaatcaatctggagactgtgctgactcctaagtaagaaggcaaacaaggatctccatagcagattgttactggggcttctgatccaagatgatatatagtatgtgatctgacacagatgaaaaaaagtcttttgagtgtatttttgaaacatcagttgctatgggggtgtttggaagtgtatcaaatggtgtcacccactaaaaatatggagtcatgatattaagagaatactagtgagttcttagtgagtcatgcattcaccctagtctaaaaaatatcttcataatgttgtaaagacaagtcaaaattacatagaaagttggattagttttttaaggcacttgtaaaacgtgagggtatattaattcaacatctattcagtaaaaatacaataacccttccctttatataccaggtactttactggatgctgggaataaaccagtaaagacatagtcatcaaaatcaagaatctgagttgaactgaaagatactgacaattacaatagtaaatgcaaggacagcagttaaggaatttattgcctatgtaactttatattttgggatagcactaagatcagacatggctggattcaaggctgaaatgatgtggtcagaatttaacttccctaccttcctccctccatttctctctctctctttctttctttctttttttttttttttttgagacagagtcccactctcttgcccaggctggagtgcagtggcacggtctcggctcactgcaacctccacctcctgggttcaagcagtcctcctgcctgagcctcccaagtagctgggactaatttttttatttttacgggctattttttgtatttttaatagagatggggtccggctaatttttgtatttttagtagagatggggtttcaccatgttggcaaggctggtcttgaactcctgacctcaggtgatccacccacctcggcttcccaaagtgctggggttataggcatgagccactgtgcccagccatctccatttgttaactctgctttcctctgttggtctcattcaggggttccacatggtagcaagatggtaccaagatggtggaaacagtttcaatcccaatctgaagatctcttatgcttcagatccaatgagaaaaacaacaacaacaacaacaacaacaaacaaaacacaagctcctctttcttgaatcatttgctcatccttgaaccaatctctcaggaaggcattgtgaatgtgattcactggtttaaacctggattatatgctacacttcctggagttttgggctctgttcagaaccacatggacagaaaaataagaaagagcacagatcctcaaatgttaccagaagtaaggcaaatggatggtgggggccaaaacacaatcaatgtgcactatatagagcctagggtttgtctttctcatttaccgcaaaattttacacacatttatcatttgttttttttttttttttttttctgagacagggtcccactatgctgcccaggttggactcaaacttctggactcaagggatcctcctgcctcagtctcctgagtacctgggactaaagatgtgtaccactgcacctggcttggtttacctttttatgctggcctttgtctttgacatatgtgggtttaatttttattgttcttaatgttgctaaatatgtccttctttttcttactgattattttaggacatttagccaaattctccataattctcaccacaacattaattgcttgtgcattttcttctcatgaggaaaaaatggaaataaactgtgactcaatattgttctcaagaaagtcccaccaagttctgtgtgtgtctttctgagaaagataccttttacattagtaaaacaaatggaacatgtaattttacagttttgttgaataaaatctctactcaaattttaacagctactgttaaaaatggctcttagatacctgtattaatttgctaggctgccataacaacataccacacaccaggtggtttaaacaccagaaatttattttcccacgttctcaagtctagtagtccaagatcaagttatcagaagatttggttactcttgaggtttctcttaaatgtgtagtaatttgttatggcaacaataaaaagtaatacattgtggctggcactgcagaggatgccaataccaaattcagcttataatttcttcagaggtattatcaagatctagttacatcttggtacaaaccaagtgtttgagagtggtatccagcaaagaaagaatgaggaatggtgcatgagaatcgatttttacttgtgacagtcgttcaacagattgaagactaagatgtgctcttgaatcatctaaagtaacatcaaacagagatgacccagatttggcaaggcaaccctcagttgttaaatatgggggtggagcgccaagattttggccatcagctttattgctttaacctattttttccaaactgaaggcgaaataccagtttctactatctcacaacaaagtgataaatgcaaatgcagttgatgaactggtttaatggtagatgctcaggcgtctgtgtgagggatgacttacagtgataaaagacatacctgctgtacctgaataaagcaaattacgaaaataagaattaccatactgattcagagaataagaggaatcactgtcagagcaaagcttgctttacttcagatcatcctcaaaggttaaaaatatgcccccaaaactaacttttcttcaaggttgctatatacatctaatcaaaattattgtatccaaatactatccattcttcattcagggttctttagacaagttcacaatttagtggcactttagcattctatttcttatataattcagtggtgtaattcttttgttgcaggcttctctcctgagaacttgggcatgagtccagggggattggtatggaaggccatctgagtactattcatcacattcaagctcattccttctctctgataaccatgatttatccctaaaccaaacttgtatacatcatttctctttgccaccagtcgaatttcttatcatgaaacttccaagttgcttaggtaaagaacactcaatctgtttagcattactgtacataaccacacccataaaatactataggttgggcataacaaatcagaacatccaacatttttgagcactgacatgaaacccaaaggaaatgcttattggagcattttggatttcatatttttggatttgggatgctcagctggtatgtgtaatgtaaattttcgaaaatccagaaaaatctcaaacatttctggtcccaagcatttcagataacagatcctcaatgtgtagcagtataggactgatgctgtgaactcaagttagctcagaacctctttgggcctcagacacactggaccctttcctccttttccacatagtactaatattatatttcatcatttcatgattttgttctgtcttgactatgaacttatattaagttcatattacatagtataaaaataacttcaggagtgataggagtcagtattagaagcgctattatttacacactactcaaggcattaggcagaaaagtatcactcaccatctaggaaggagtcttgatgcaaattataatggacaatgtactgttttaaacatttcttgattccaactatatccacttttccagatcactttatattacattacagacacaggtggtcaaatccatggagcaaaagacttgtaacattatctgctatgtttcaatgtgaggtgagtttttttccccttctgccctttaatatcacctcataatgacaccaattgatgtgttcttacagaattcattagacctaattttgttttggcttatgatctttatgtggatctaaaccttcctataccttcataaaatatgtattcattcaccatatataaaactattaaatatttttccaatcaatgttggttttcttaatcttaggctttttttttttttttttagctttctgtcagccccaccttagtggtgtgatcacagctcactatagccttcaattcctgggctcaagtaatcctctcttttcaactcctgagaagccaggactaaagtcatgcatcaccacactcagctaatttttaagttttttttatagagatggggtcttgctatgttgcccaggctgatcttgaactcctggcctcaagcaatcctcccacctcagccacccaatgtgctattattacagacatgagccactgtgctggccctggccctctgtttagcctttttttttttttttttttttttttgagacagagtctcactctgttgcccaggctggagtgcagtggtgcaatctgagctcaccacaacctctgcctcctgggttcaagggattctcctgcctcagcctcctgagtagctgggattacaggtgcgctccaccatgcctggctgatttttgtatttttagtagagacagggtttcactatgttggtcagggtggtctcatactcctgacctcgtgatctgcctgcctcagcctcccaaagtgcagggattacaggtgtgagccactgtgccaggcctagtttagctttttaataccatcttcagtttattttacattactaatttaccaggacaaccacattaacttaataacaaaacttaacaggaaactattgttcactcagatatttggttagacagcaatctgggcaagcaggtagtaaaccctgcaggtgagtcaggaatctgttacaaagggcagagctagctgtagatggaaaccagcagccttatcttcctaaaatacatttggataagacacctcagaaataatgcctggaaagttcaatccgcttggtaattccattccatcttaactccattagacagtatcagtgcttttgctagaagactggattttctctggtcaatttttgtggtttatatttaacaacatgatggtattcttttaactatgtgggttttgttttcattttacattattttcattttttcttgttttcttctcctatttgttacttctcctaagttgtcttccttcttgtgtgttgtgtgtgtttcaccatgcttcctctttttttcttctgctttcccagaagatcttgccagtagaaattaataaggactgtgtactttcagtcattacaattatgtattcagccagtacatttatctggtacaaaaatgaagctctattgcatcacatactctcagcttctttttgtgaatttagattttataaaaaatacattccaaagaggtaatactaagaactgatgatttttttttctttccccctaggagacttctcagttggggtcatactactttctgtctcagcccattttctgctgctataacagaatacaacagactgggtaatttataaagaaaataaatttatttctcacagttgtggagcctgggaagtccaagagcacggtgcctgcatatggggagggtcacctcatggtgaaaggcccaagacagcatgagagacagagaggcaagatgggagccaaacttatccagttattaggaacccactcctgcaataactaacagtactcctcatgacctaatcatgagacctcttgaaggtctcaactctcaacactgttacaatggcaattacatttcaacctgagttttggtgggtacattcaaatcacagcagtcctcagcataagcaacttggaaggaaactctcactctgtcgcccaggctggagtgcaatggcacgatctcgactcactgcaacctccacctcctgggttcaagccattctcctgtctcagcctcccaagtagctgggattgcaggcatgcgccaccatgcctggctaattttttacatttttagtagagatggggttttaccatgttggccaggttgttctcaaactcctgaccttgagtgatccacccacctcagcctcccaaagggctgggattacaggcgtgagccattgcacctggcctggaaggaaactctttcacattctctacattatcaatcacaggacagtgttgtgttttttgtttttttttttttttgagacggagtttcactctgttgcccaggctggagtgcagaggtgcgatctcagctcactgcagcctctgcctcctgggtttcttgggttcaagcaattctcctacctcagccttccaagtagctgggactacaggagcatgccaccactcccagctaatttttgtatttttttagtagagtcggggtttcaccatgccagccaggctggtctcaaactcctgacctcgagtgacccacctacctcaacctctcaaagtactgggattacaggcatgagccaccgcacccggccaatcacagtgttttcaaagtgttagtcacttgcctcagattcacctgggtgctggtacaaatgcatattcataaggtggagctcagaaatctggtttttaacaagctctctaggtgattcttctgggcaccgatgtttgagaatcatgggggaagcaatatgtttagcaaataataggtccataataactatttgatgatgatatactatgcccttagtaacttccaaatgtctctcatgtgctgaactttcttctgtgccttaaccctgtgttttcgaccactgcctattctttgagtttttttcatcccacactcattcaaaacattcaaaactaaaccatctactggacacctccaatcttgtcactacgttattgttacccagaagtcatgtttggagtcatttctgtttgtgtttcatcatttttacttaatcaacatattgaccattgtgtcaagcactgatatagacagtgatgaatatgacagatatgggtcatactctcaaggatggtaaagacagttttacagagagtaattaaactttataccatcagttccttagtgtttttctcagaatattccctttctttgtcaccatcctaatctagaatcttatcatttacgctcgaactgctttaatttttcctagtctttgttcctaatttcccacctcttctgaaagattaatctcctaaaaaattaatctttaaaacattataaatgtttttaccctacttaatgcctaatttccgtgaaagctgtcgtaatcaaaatggaattatatgggctcggtggtacacacctacagttccagctacttgggaggctgaggcagcaggattgcttgagcccaggaatttgggggctgtactgtgctatagacttgcctgtgaacagtcactgcatcccagccccatctcttaaacaaaagggggtggggggccccatctcttaaacaaaagggggtggggggccccatctcttaaacaaaagggggtgggggggccccatctcttaaacaaaagggggtggggggccccatctcttaaacaaaagggggtggggggccccatctcttaaacaaaagggggtgggaggtagtcactaatatattttttaaaacactgaaaaatagattcagaggtcatgaagagaaggggtctcatgcttgcacacctgatgacaaaaactatcacaaaaacctgcaaaagccacaatcttttttttttttttgagatggagtcttgctctgttgcccaggctggagcacagtggcacgaccttggctcactccaacctccgctttctgggttcaagcgattctcctgcctcacactctcgagtagttgggattacaggtgcatgccaccacacccggttaatttttgtatttttagtagggacagggtttcgtcatgttggccaggctggtctcgaactcctgacctcaggtgatccactcgccttggcctcccaaagtgttggaattatgggcctcagccaccgcacctggccaaaagccacaatcttacacaaaaaatacttccgcaaaaacatctgcccagcaacttcctgtccagtttccgactggtgtcaccttgttattgatcttcgtagccaaggataacggtttaaaaacaattatgtaattctcatttttttttaaattttaaaaacctttgccttcctttacctccttgaatacgcacgtagtttactaagtcatgagtattttcacactttattcccaaataaatatataagaatcatagaatgatagaattgaaaaggataaaatcacacagttgtttctaactcccaccccttagaatgcggcaaatgaaaaaaatttttttttttgagacagggtctctgtctcacaggctggagtgtagggatctccgctccctacagcctcaacctccccagctcaagcaatcctcccatgtcagcctcccgagtagctgggactacaggcctgctgccaccatgcccagctaattttttgtactttttgtagagacggggtttcgctatcttgcccaggctggtctctaacctcaggttcagcctgatcctcacctccaggctcaggtgatccgaccccctaggcctcccaaggtgctgcgatgacaggcatgagccaccgcgcccgcctataatcaattttcaatattctaaaaaagcctaccagaaattgtatattttctggtggtattaaatgctaggtttccttgttttgtgctagaattatatcagatccacaataaacctaggttccgactgagctgggtctgattgagcaaaatctgttttcccattattgttatgttcaatttggcaaacagcttttcaaaatataggagtgaagtcgtggtcgaactaataaaattggtaacacttgctacaatgtttgcaattcgcagaaaacttcactgacttcatcttaacttattcctcacaaagctgtggaatcaccatcagtagagcaggagtcgttggctcaatgcagtgctgtctgcaaccgctcggagcttctaggttctttccgtgggtctccagcttatgagcacctacattccgcgattcggaagcacctgcctacccctcagaagagagagacagctccttcttcccgttccggaatgtggtgcgttcgcacgcatgcgtgacacggctactccgcgcttgcgccgatattctccgcttggggcggataccctgggtgacccgtgagcgtccgcgcccggcgcgcgcctgcgcagtcgcttttcgagagtttccgcccgctacgttcccgtctttcaaaccaccccaccacctataccattcattccagtctcctcaattctttcactgtattaagacggcctgccctctggcacgttttctggaacgaaagcggcttgggacagacagactcccttcgccagggagccccgaccccgagggcgcgccctgagcgtctgagcgcagccccgctgcgtccccagttgtatcccccgccacgcccgcctcttccgccgctcgcgcgcgcgcgcacggccggccacggcgcgccggggttggctgctacagggaccgcggtggcggcggcggcctcgacagcggtagtgccttctactccgcttttttagtttcctccgccccctcccgtgggacgctgttgtgtggctgccttaaaaaaaaacgcaactttattgttcctcagccccacctccggctcggcgggcgtcctcaggatgcactgaggctgaggggaggggaggcggcggagggtcgaggtcgcggtccctctcctccgagcgcccggctggaggggagggagtcacgatgtctggtagccgccaggccgggtcgggctccgctgggacaagccccgggtcctcggcggcctcctcggtgacttccgcctcctcgtctttatcctcttccccgtcgccgccttccgtggcggtttcggcggcagcgctggtgtccggcggggtggcccaggccgccggctcgggcggcctcgggggcccggtgcggcctgtgttggtggcgcccgccgtatcgggtagcggcggcggggcggtgtccacgggcctgtcccggcacagctgcgcggccaggcccagcgccggcgtaggaggcagcagctccagcctaggcagcggcagcaggaagcgacctctcctcgcccccctctgcaacgggctcatcaactcctacgaggacaaaagcaacgacttcgtatggtgggtttgaagagcactccctccttgtccctaaattatgagtttctgccgcttaggcttgggggcggggggtctggtgtgggggtggcttgttggagagcttgggatactggtgctgtggtggtgtctgcagagggaatcgagcgtttgcaggcattcgagctcctggttggtggggtgaaggaatgttggagtagcgaggcagggtggggataataaagaggtaggtaagtgttgctgaggaggaagtgaagggagtttaacgaatgacgagggaagaggtggaaggtcaaataaatggttttggataacaaagttggcagagaggttgagtcttaaaatttttgcctctctgatgaattgaacactcagtcaatcaggagtccttgttgagatgaatgaaatttgcaaatggagaggactaagcttcctcggatgcagaggggtggagttggtcaaaatttatttgaagtatggtagatgatgctgtaaacataagcatggatgtcttataaagacatgctttttataataatgtaagtacctatcgtatgtatgtgtaaatatcttcttccatttcaaaggatgggccacttaggaatcggctgttgagacgactgtagtcaaagtctgttaacagatttttcacttctccaccaagtgtcttgaaaagagagaaccacgtttgttaaataacatccctgtgtcagatgtaactgtactatactggataacagagtatactggaacttctgacttgagaaatgctaggtatagacattttgtcgtcatagttggcatcttgaatgatacagagtaacatttagtcatgacatttgggatagagaggttagtcatatgaagtgaaaggtggtgttgattgtcttgcttgagagtgttttggaatttttattggattttagatattggtaggattatgagaagtaattgctgttagctagctgcttaagaagtggtagtgtttcgtactttcctttttgaggaaattgttgatcaaatattaggcatgtaggaagttggctgcttgcacagtcattatgagggaagttgattcagatcagggttgaagatggtctgagttggtgttattaaataagatagagctagaagttggaactgttaggaaagttattgattagacttacggtttctagttcctgcagaaaaatgatgtctttattcacctttctgcttttttgtacgttattctttatcagaattaatctgtttttcattgaacatttgggctgtaatatgattgttatttataaataagcagtttatggttggggctgagaagtgtttgcacttctacacagtcgatagtgcgagtagctaataagctaataaaacaaagtggggtgtgcataatttagttgtctttttagccactgtttgcattttaatttttagtatacttaacgaacacaaacatgttagcctccgtgtaagtacactaaaataaagtaaaagatgtgaggaataaggaatcgatcattgtcattcaagagatacttgtatgacattcactgtcggccaggcaccatatgaagttcagtgcactgcaggctatgctatagggaattgggaactctttttttaaaagagtaaaaatttgtatttgagacggagtcttgctctgtcactcaggctggagtgcagtggcaccgtcttggctcactgccacccccgcctcccgggttcaagcaattctccagcctcagcctcccgagtagtagctgggattacaggcacctgccaccacacctgcctaattttttgtatttttaatggagacggggtttcaccatgttggccaggcaggtcttgaactcctgacctcaggtgatctgctcgcctcggcctcccaaggtgctgggagggattacaggtgtgagccaccgtggtcctgagtatttcactttctaagaatctcattagttaattatttctttttctggtgaggtttaatattcagaagaattaattaatgagaatctgatttaaaactcaagccaggtttgattttgtccagactcttggggtaggatgatatggattaggcaaggcccaaggaatcctttttttctttttttttccccccgtttggctgtgggtcttgtcttgtatgccccaaggtcaaactgtgaaccaattcaaattattctatgcttttatatttaaacgaagcccaagttcaaataatgataatttcttattcatttatgggacattttaaagatatgcttatgcttcacgttttattttatccttagaacaattctgtgatgttatatataacttatttttaatacaatactaattattttctcattgaggcacagagaagtaattttgtttgtcgttggacaggtaaggacaaaatgagaactcagatttcccagttctcaactttgtgttttctttgtgtgcaattagagagtttcagatctgtaagttcgagtacatgtatttagcccagtggttcttaaacggcacagattggaggagaagcagctgtttcataatcatatgagataaatgttttatccctcaccactcccttttcttacctgcccacatcccaagaagacgtacctgaattggaggctggggtgggtggtgtaatttgcatatgctcccctggtgatagggacctgtccttctcccctccttgagaactgttgatttaaatagtcacgtacctaatttcagtaataaacattggcctctcctgacttatatttgaaagtaagtttatatttaattgaagaattcataaacattttaggggtttaggttgcatttttatattttattttacacaaaagattgaaggtattatcaagttgaataattttaacagtgttttattgatggagaatctaatacaggacagtagtatttagcttgacattggatacattttcaacattcagaggaagtctttgttattttgttttttgcaaaattttcttacggttcatttaactagactgtgagtctggtctgtatttgaaagatgacttctgttttttatacggactccttttttaaacaattctataactactgcctttgtattagcttttccagctatctcaaatgaagttttctacctctgcaagtcccagccattcttgcagcagaagtatacgtttgcatgtagatagtaagctctttatgagaaggttgactttttttctttttttttgagacggagtctcgctctgctgcccaggctggagtgcagtggtgcgatctcggctcactgcaagctccgcctcccgggttcacgccattctcctgcctcagcctcccgagtagctgggactacaggcgccggccaccccgcccggctaattttttgtatttttagtagaggcggggtttcactgtgttagccaggatggtctcgatctcctgacctcatgatccgcccgcctctgcctcccaaagtgctgggattacaggcgtgagccaccgcgcccggccgagaaggttgacttttaatcatctgcttgatagaaaatagttaggatctacattaaatagatctaccattcagtaaatatgtgactgcctattttgtgttaaactaagattctctcttcttaaggagctcatgatttaattcgaagaatggcttttaactgtgtaattataatatcataacctggtatcattgcctctcttagtgtcatgacagatgttagtaccattcctttttcttagtgccatggcagatgttaaatactctaatggactatgcatagtacaatatatagccattacctattaattacattttagcactaaaaatgaagcctgttgaccattcttgttaatataactggtttccaattttttttttcctttttttgagacagggctctccctatgttgcccaggctagtctcaaactcctgggctcaagcaatcttcatgtcttagcctctcaagcagcggggattagagacgggtgccaccacctgtaatcccaggatatttttaatagtctgaaaaacacgtggctctgtttttcagactattaaaaagtgagggtgggcaccttggttcacgcctgtaatcccagccctttggtaggccagggcaggaggattacttgaacccaggagtttgagaccatcctgggcaacatgacgaaaccccatctctacaaaaaatacaaaaattagcctgtgtggtggcttgtgcctgtagtcccagctactcaagaagctgagatgggaggatcacttgagcctgtgaggtcgaggctgcagggagctatgatcacaccactgcactccagcctggacgacaaagtgagaccctgtctccaaaaaaaaaaaaaaaaaaaaagtgaactagaacgtatcatagaatctgtcgtaataaagacagtaacagtttgtgcagcaatgtatgtggaatgtatttctcactgggtacactggtaaaattttttttaaagtcactgaattataggactgaatttcctctgataggaaagtggaaagtttaagtgacttttctttttagaccattgtgagcttataaatataggactaaatataatttaaagagctgttaaaagcatgttcagttactggaataaaccagcatttattatattattatagtaatatctgtcaagaacttatttgaatctgcaaaagtcaaacttgatgcttcttttgctttataatacatgtgccatttggatgtcaatgatgaaacatactctgcaggagatgatgtcatattttatcagacctattggtactgtcagacctgtggactatcagatggtggggcatcagcatcaatggtagcaggagacttctatgggtgaattaaatggtagagaaaatagatgatcatgaaacaggataggaagactattaacttggaattgtagtctataaattgagaagaaggtacttgtgcaatagtagttcattactaaagaatgtgttgataagcagttatcttttccttttacaaatctttataccttttctgataatgagccaacattacataggtggatatgttccatctaagaactgttactgattaaagtaactgtagccttaaaccttgttgcttacttttccttcttgtatgtgtatgttttttcttaatggtgattttttcatattttatataattattttaacctgctacccttttcctcagaaaacttccacagcttgggaggaaaggcttttttgacggtggaattagcccatcgtctttttcctgttaaaatttgtattacagggtgagtatcctctatctgaagtgcttgagaccagaagtgttttggattttaggggtttttttggtttttgttttcgaattttagaatatttaaattatatttaccaggttagtatccttaatctgaaaaatctgaaatccaaaatgctccagtgagcatttcctctgatagtcatgttggcactgaaaaaatttttgattttgcatgattttggatttcagattttcagattagggatattcaacctgtataccaaataaaatgttttttaagttgggcatgatggtgcatgcttgtagtctcagctccaggagtttgagtccatcctgggcaatgtagtgaaactctgctaaattgtttttaaagttcttgatctgtttttatatgtgatgttgtatgtaggacaaaattctgtaagcattcaggtttttgtgcagacttgtctttgccctccaccttacttgttctttgtcctctttctttatgtgtgtatgagccaagttctattcagataggttggtactttctcaaacaatatattcactgagagtaacatgtttttctttatacttaaaatatgttagttgtcctttcatttttcacaattaagttttatgaactgattttgcctctgtttctatataaagtgaaacatagaatgcagtaggtgatctgatttctgtttattgtatttctggtgtaaccattgggaatccatccttctttcctaatctgtgtggtttggggtggtacattttttccccaaattcagaattggaacacatgatccatgctcaagtgtctagtgcattggaatcctctgtctttagtattaattcacagatgggcatttggctctaaatagagataatgagacaaagtaggctttgtaaaaattacgactgttttgggggttcttttagatatttgaaactcaaacgttcataaatgccaagtccactcaagtgaagatggaatgtgttgtactgacaattagtttgggacaaatactcataataataagtgctcaaatataaattgctatttgccaggcactattttaaaggttttacgttacttgtttaatcttcacaacaactgtttgctgtagatactcttatagttcccattttgtagatgaggaaatgtggcccatagaggttatataacttgtctcagttacacggttaataatggtggtaccagtatttatattcagacaatttggctcagaggtcaggttcttaaccactattacaaatggttacccaagttaaccacccatttccttgcctttatttagaggctgattttgtttaaaattagctttactaagttataatttgcataaaataagtcactggtcataagtgtgtagttgaatgagttttgacacatgaatacacctgtgcagtcaccaccctaatgaagatatgatacatttccagaaagttcacttttgccagcacttcatactctgtgtctaccttcacacctaacacctggcaaccagtgatctgctttgcattgctgtcattttgccttttctggaatttcatattaatggagtcctttagtcggtagtcttttgtgtctggtttctttcgtttggtataatgttttgaaatacactgatgatgttgagtgtactgttttttttcttttaattgcttagtattatcccattatatggatataacatgaactgcttatatatttgctagttaaaagatttttgacttgtttctagtttttggctattatttagaaaattctgtaagcattcaggtttttgtgcagacacgtcttcacatttttagggtaaaaatatctagtagtgaattgctgagttctctgccaagtgtatgtttagttttaaaataaactgcaaaactttttaaaaactgcctctaccattttgcatttcttttttatctttttttgagatgggagtctcatactgtcgccccagctggagtgcagtggcacgatctcagcttggtgcaacctctgcctcctgggttcaagcaattctcctgccttaacctcccgagtagctaggattacaggcgcccgccaccatgccaagctaattttttgtatttttagtagagatggggtttcactgtgttggccgggttggtctcgatccctggacctcatggtccccacgcctcggcctcccaaagtgctgggattacaggtgtgagccaccacacccggccaccattttgcatttctaccagcaacaattaaaagttcttttatttggtttgtatttatttcttgtattgttttatttgtttttaattgtttcacatccttgccagtgctcagtgttttcagtcttttaaatattagtcatttttgtggatatgtagttttatcacattgttatgtaacatatttttatgtgcttatttttcatttgcatatcttttgtgaaatgtctgttttgatctttggcccattttttcccttaaaattgcatgtcatcttgcgttgtaagtgttctttatgtattctgcatacatcttttgtcagacctgtgtattgtggtattttctcttagtctgttgcttatcttttcattttcttaataattttttaaagtgcaaaagttttttcttttttctaatgtatcgataaagttttcagttttaagtccaaattgatttttattatttttaatttttgtgttctagctaagaagttatctaacatgaaattagaaaacattctcttgtatattttctactagaagatttatagttttcttatggttatgatccacttcaagttagtttttatacactgtgtttggtaagggttgaaggcttcattaatattataacatcatttgttgaaaagatcatctctgttcattgaattttcttggcacctttctcaaaaattaaccatatatatgagtttatttctgcaatttttattctgtcccgttggtgtatatatgtttatccctacacaagtgccacactgttttgattatggtattattatagtacatcttgaaatcaggtagtgtaatttttatcctttatttcaaagttgttttgattatttatgttctttgcatttccacataaatcttaggattagcgtgccaatttctataaaaaaggatgtaggattttaatgttggttactttgaatctgtgatttcatttgggaagatgacatcttaatattatcttttgaatcatgaacatagtatatttctccaattatttaggtcctctgtaatttctcttagcagtgtttatgcttttcagttgaggtttttcaccatatttttaaaatttacccctaagtattttatgtttttgatggtgttctaaatgttgttcttttaatttcgatttctaattgttgctagtatgtaaatacactttttttatgttgaccttgtattttatgaaattttaagtttacttactagttctaataattttttggtagaacctataggatttgtaagaaaacagtcatgttatctgtatatgaatatacttttacatcttttaaatttatatgccctatttaaagaacgtacgttaatggatttatttgattgggtaattgtttaaaaggattttttggacctttattagtgagtgatactggtctgtgaatttcttttaatttttttctggttttcatatcacagtgtattggtttgcttgggctgccgtaacaaaatacaacagactaggtggcttaaacaacagaaatttattttctcataggtctagagactagaagtacaaaacaatgtgtaggcagattcggtttcttctgaggcctgtttcctttctttttttcaaaagaggtggtcttgctgtctcgcccaagctggagtacagtggcaccatcacactgcttactgcatcctcgaacttctgggcccaagggatcctcctccctcatcttcctagtagctggctctacaggcatgtgtcaccacacctggataatttttataagtttttaatagagatgagggtcttgccatcttgcctaggttgggccacttgttgttgtgtcatagctttgtcacctctcagtctgcatgttgcctgtatcttagaagaatactggttgtattggattggggtccaccaatatgactgtattttaccttgattatttctttaaaggctttattttcaaatgcaaattctgagatactgggagttagaatatagggattttcttttgcgagggatggaaatacaatttaacccgtaacataggtattattgctggtttcactttttctttccctccctccctccctcctgctggtttcactctttctttctttctctttcttctttctttttctcttttttttttttgcgtagagacaggagtctcactgtgttgccctggctggtcttgagctcctgggctcaagtgatcttcccgtgctttgacctctcaaagtgctgggattataggcatgaaccactgtgcctggccagtgctggcttctaaaagacgatatggaatgttccccttctattttctgaaagagtttgtatgaaattggtgtttttccttaagtggttggtggaacttactggtgaagccatagttttgggtcttcatatattttgtatgatttcactccttccctttgtgggaaggtttttaattactaattcaatttctttaatagacactactcaggttctatatttcatgaactttagtagtttaagagtttctccattacacccgtgttgctgaatttattggcataataataatataccccttattcttttaatgtcttggatttgttaatggtgtcccatctttcattcctgatattgataatttgtgttcttgtgtttcttttttccttgaatggtttagctagaggattattaattttttttagtcttttcaaatgatcaactttcatattattgattttctatatagtttgttcattttctattccactaattttcagtttactttataaatttcttctgctaacttggagtttcatgttttcttttctggtttcttagtacgaaagcttagatcattgatttttggccctcttttcaatagcaacacttaatcttatcaatttccctttctaatccctactttagctgtatcttcaaattttcaatcagttcataatacttctcatttcccttgtgatttcttatttgaaacatggattattcagaagtatgttgtttaatttattttacctgtacatgcacaggtttgttacgtgggtatattgcgtgatgctagtgatcttgtcacccaagtagtggacatagtacgcaacaggcagtttttcagctcctaaccccctccgtccccgattttggaatcctcagtgtttcttgttcccatctttgtgtctgtgtgtacccagtgtgtagctcccacttaaaagtgagaacatgtggtatttggttttctgtttttgtgttaatccgtttaggataatggactccagctgcatccgtgttgctacaaaggacatgatttcattcttttttatggctgcagttgtttaatttctaaatgagaattttctgggtatcattctatgtctgatttgtgacataattcaactttgttcagttaatatagtttgtatgatattagtcctttttatagagactcgtttcatggtccaccataagctttatcttcgctaatggtccatatgcacttgaaaaaaatgagtactctgccatgtgtaggctgaggttctatacatgtcaaatagtaaagttggttgatgtgttatttaagttcagtatactcccattcattttctgtatacttgtactgtcagttacatattcttcaatcatctccagtgctaactagatttggctatgtctccttttagttttctcagcttttgcttcgtgtattttgaagcttacacagatttagcgttggtgaattgatctccttatcattttgaaatgtcactctttattcctgataatattccttgttctgaaatctactttgatgttaatatagcctcttcagcttccttcctcccttccctccctccctcccttcctctttccctctcttctccctctccctctttctctcctctccctctttctctcctctcctttttctcttctcttctttgagacagggtctcactctgtcacccaggctggagtgcagtggcgtgatcacagctcactgcagcctctacctcccaagctcaagtggtcctcccacctcagcctcctgagaagctgagaccacaggcatgggccaccacatctggttgattttttttttttttaattttattttgtagagacagggtctcgccatggtgctcaggctgatctcaaactcctgggctcaagcgattctcctgccttgggctcccatagtgctggaattacaggcatgagccactgacctggcctagctttcttttcataagtgtttacatggtatgtttttattcttcatgtctattatgtacgtgttttaatatttaaagtgggtttcttgtacccagagtatagttcagtcttcctttttatttagtatgacaatctgcctttgttgtttttgttgtttgagacagagtcttgctctgtcgccaggctggagtgcagtggtgttatcttggctcactgcaacttcctcctcttgggttcgagtgattctcctgcctcagcctccctagtagctgggattataggctcatgccaccatgcccagctaatttttgtatttttcgtagagatggggtttcaccatgttggccaggatggtcttgatctcctgactttgtgatccgcctgcctcggcctcccaaagtgctgggattagaggtgtgagccactgcgcccagccaacagtctgccttttagttggattagctggactgtttacattttaacataattatgatgtgcttggttttgtgtgtactgtcttgtttgctctttgttttctatttgtctcttctatttcttttctctttttttcttcctttcttgcttttgggattaattggatatttttaagatttccattttatttccactatttgcttattaatgattgtgtgtatttggtggggggaagtggttgctctgaggtttacaatactgatttttaaactttttgtgttctaccttcaaatatttcatatacaatataaaaattttgcaatagtgtatttccatttgtaggatccattctgctactcccttgttgtcaaaagtgttagttctctgttccttttgtttaaaaaaatgaggtgaaattctcacaaccctgaaatacgccgttttaaagttgtgtttttagtacagttggcagtgtttcacaaccatcaccactgtctattttcagaacatttttatcagcccctaaagaaactctgtacccgttaagcactctccttttcctcttcccttacaatcactaatttactttctgtctctgtgaatttacctattccagacacttcatataaatgcaatcatataatatatggtcttttgtatcccatgtctttcacttaacatgtttctaaggctcatccatgttgtgacatgtatcagcacttcattcttttttatggttgagtaatattccattatgtgggaatattattaaataacataatatttaaagttattttaaaataacattttaatataatttatatttcagttgatggacaatttgggctgtttccactttctgtctattatgaataatgttcccgtgaacatttgtgtatgagtttttgttttaacacatgtttctagtctctggggcatttactcacagtgtaattgctaggtgatatggtaattgtgttttgctttctgagtaactgccaaacagttttccatagtagctgcattactttattttcctactagcaatgtataagggttctaatttctccacatcttgtcaacacgttgttttcctttttgataatagccaacctaatgggtgtgaagtggttattcattgtggttttgatttgcattccccttttcactagtgaggttaaccatcttttcaagagcttgttggccattcatttattactctttaaaggttgtgttttcatttttaataattaacttgtttcagacagaagtatgtttcttggtagccaaagggaagttaagggaaagttgtcatccatattttcactgtttgaatgcattttgtgtagtggtatatgcaatatacagtgtttaggtttttgtttcaagaatagaagactagtttaattggtactatattttaaattcagcactgtagttgtgaaataaaacttaactactgaaacaactttttaaaaaaattaatcttaaaaatcaaagtagggatacaaggaacacatctcccatgcattttggagatttctttcacccctgaataatgggatggggatactatctaatgaaatgtatcacacatggtaccctgttcatattttcttatactgtaatagaaattcctgtttttatagctcctcctgtgtaggcatttgtttttcttctgtgtgaacttggtatcttccccagttgattggcctgtgattgggtactcttctgaaatgtgagcaaagcatagcaattacatcttactggaattggcttgaaagatattttggccaattatattttgtgttttaggaattggaaataaaatgagaaacacttgagttggcctaaagttcttggtgtagtgttggtgctgaaggggctgtatattgtaagcgggtagtcttgagaagcagaaaagtattagtcacattaatggtggagcactagtgaagatctgtgtctgtgtttgaggcctggtactgttgttacttgtggtttactatgagaggattctcctaattgtttcacctgtacctaacttataactacacaagacgaattaaatcttctgttaactgtaaacccttggtggtaattagaactgattctgtgtttgggcaggagccttgggagtgtgtgaatggaataaaatccaggaagagatcaagaatgtattggggtaagaggaatcagcagagatacttcttggccatatgtagttccctgattcaatcttgcttttctgttatggataccagaaattggttcacttgcattatcttttcatggctattacttgtattaatcatggtgtcctttccttcctactccattgtggtctcatccttttcgaacttctgaccctgaagctagcacatagttatttagaatccttatttaaaaaatattttattgttaaattacagtctaaaatgattgccgctatgctattcttttcttccttacctctcgtctccttattcatagagcctgtgacttaaggcaatgttaaacacaggtcttgatggagacagattagggaggaatcacttcacaaaataccaaataagtttaatctctgcttttgaaaaaatggagatttaagttttttaaggctttttattagagcaaatggaactgggaaagagtgagatgatgggacatagactggaacttaactgctgcctgtgaagattggttcagaggatctagtgttatcggtataggtgtaaagaagagtttgaggtttattatttttttttcctttttactcattttttttctttcagtcctgaatatacttggggccagttgaatttggatgctgcttttgaaggaagcaaaggaagaattaagaaattaagggaaaagaggaagctagagaaatttcaagttttgaaaattttgtgaagaaggaagaaacatttccatggcccttttgctgggcgtctttcattcttgaagttgtatataaatttgagtatatttaaaataatttttccaaggtcttctatgtgctgatagctgtgattttgattttcataatcacaatgatgcatatttttattattttttactcttctgagattatagcaagatagaaagaacattgggcttggaatttaagaccttgaaatttaactttggacaaataatttattgttttcgagtctgttttttcatgtataaattgggatgtagtaatattctataagattatgaggtttagagtatataatgcatgtaaaaaggcattataaattataaaatcacaaagaatcaggtggttatttgctagtgtttggcatttggtatcaaaacacgaaagtgtttctgcagtcctgtttatgtgaggtgtaactactgcttgtttttctaaatgactctagattgtgcctggctctgattatctcagtaatattattatttttaagtatttaacctttgaaagattgattttttttttagttggaaccagtactactataagacagttgacacattttatgaaagcataatggagttagcatttgtactaaaatatgcatgtattgaactatgtacatattagtttgttggacagttctaagatagtactttgtaagtacttattaaattcacttaataagtttggatgctgcttttgaaggaaataatgcatataaaagggaatgacaaatagagcactgattaacgatgttacttgggccggattgcaatatgacccttgattaactgagatgatatgtcttataaatgcatattagatatgtgaaataattttctgtatctggatctgttctgtactgttttttttttttttaaatgtcccaagtgacatacattatcttttggcaagcttaaggttgtgcagtatgatatctgtccttctggcaattggtataaaaatgtcttcttcacagcattttattgcttgaagaacacgattttaataaacagtgacaagaggtaaaagttcaaaataatctctactaatacaggttgagtgtccctaatccaaaaatctgaaatttgaaatgctccaaaatctgaacctttttgagtgccaccatgacacgcaaagaaaatacttattggggcattttggattttaaatttttagatgagggatgctgaaccagtaagaatataaatgcaaatatttcaaaatgcagacagatccgaatctgaaacacttctggtctcaaccattttggatgatggatattcaccctgcagtagtttgaatgatactcagttttttgttatatttaaagttctgtggttggagttgtaaagtcagatgcctataataaccatctttttttttccatctgaaatcattattcattatgcttatttactcttgtgttcctttctttttcattctaattctttcttgatttttttaacctcccttttaaaataattctttcttcagaacaagtttgctaaagttttctaattgagaattttttctttcagttttttaattattgttattgtatttctttcagtccattttgaaatattagattatgattgttgtttgttttggtcatatttttctggcttgctttcattgtttctagggacagtattatgtttctttttcctttgggaacctttgtttctcattttttagtgatgaaagataaatgtattttgtatttatgttcatcattactatttttagagctctttatttgtgtacatcctagtttctgtctgtcttcatattccttctgcttgcaggatttacattaatatatcttgtagtacaggtctgtgggcagcaaattctcttaaatttgtgtttgtttgaaaatgagtttatttgctttcattttgaaagatatttttgttgagtataaaattctgagttgaaagttttttctcttagtattttaaagaagtatttttgtttctcactaaaaaatgagaaacaaagaattcccaacggaaaaagaaacataatactgtccctagaaacaatgaaagcaagccagaaaaatatgaccaaaacaaatgacaattataatctaatgtttcaaaatggactgaaagaaataaatgcagtaacaataataaaagaactgaaagaaaaaattctcaattagacagtgcctgctccattgtcttttggctagtatagtttctgatgagaagtctgtttccgtttttatctttattcctctgcatgtaatgtgtctttctagggctgcctttaaggttttctttttatttttggttttagcagtttaaagtgcattgtacgtgttagggatattttcttgtttttgaaatccctatttaggggtttctgagtttcttagatctgtggtttgatgtattttgttattttaaaaatgatttcagttactgtctctacatattttttcctaactctttctctgtcatctgtgacttcaattacatgtatgttagaacatttcacatatgtcacaactctgggatgctttgttctctgtctgtgtgtgtgtgtgtgtgtgtgtgtatctatgtgttttgtcacttaggctggaatgcagtggcctgaggagaggaagagaggggggaaatagcaggttggtggaggagtaagaacacagtgaggtttgccatctaatatgggtgcaatttgtggctccccaaaacagttacggtagtaacatcaaagatcactgatcgcagataattatacaggtataataataatgaaaaagtttgaaatattgtgaaaattaccaaaatgtgacacagagatatgaagtgagcacatggtgttgaaaaaatgagctgccaacagactcgctcagcacagggttgcccattctccttgaatgcttttgattgacagtgttacagaggtcctgaatggattgtttttctaaatggatggttctaaatggatacgtttttcccttaacctactgttggtatattcttgttcttcaaaattggaaagaattaatggtatttcattaggatctcctcttcatttctgtagtttctgagatttttcatccctttcttgggaaggggagtaattggccagcccttctttctttattctattctacctatttctgacaggaattctttaaagtttttggcttgggtggatagtactcttcctaagtattgtagtctgtgcaggctgctataacaaaatgccataaaataggtagcttaaaaacgacaaaactttatttctcatgtttgtggaggctgggaaattcagcctccacaaacatggggaggtttttatgtctggtgagggctagattcctgatacacaggcagtgcctgctctctggatctgcctgatctcatggagggaagaggggataaaattcctttagacctcttttgtaagggcactaatccctttcatgagagttctgccctcatgacctaaaaatctcccaaaggcccatgttttaacaccaccttgggggttaagatttcaacatatgaaatttgggagaacacaaatatcagaccatagcaccagtcctattactaatgtatattttcccgtattttctctttttggtgtattctgccactcagtgaatattgtgtgccaggcattgtattgagcgcctcatagatatcttgttaatctgtgtaatgattctatgatataaatgtcatccctgttatacaaataaggaattacaattagaaagattaaactacttgctcaaagtcacaaagctgtagatggcatagctaggattaatttcacttttcttgaaagctgtggggtagaactgtgattaaaaagccagtatttcagccaggaataagtggctcatgcctataatcccaacactttgggaggccagagtgggagaatcgctccagcccaggagtttgagaacagcctgagcaacataaggagatcctgtcttatacacacacacacacacacacacacacacgtatatttatatgtgtatatatatgtgtatatagtgtgtatatatgtgtatatatatgtgtgtatatatgtgtatatgtgtgtgtatatatgtgtgtatgtatatatatatgagctacatgtggtgatatgcacctgtagtcccagctacttgagaggctgaggcaggagagatgtcccgagcccaagaggtcgaagttgcagtgagtcatgatcatgccagtgcactccagcctgggtgacagagtgagacactgtctcaaaaaaagaatggagaccttctttgattctcttgttattcagaatacatttcttaaaagctattggctttaactgatttgatagtaatttttaggtactgtaacttttagtataagtagaacacattatgtgacatgacacgtactgtacccctgctttttcttttttctttttaaataaactaacggatgatggagctgtgtgcgaggtaaacctgtagtcatttcttccagttttcaggccagaaaccttcactgatttttgtctcatacccaacatctatcagcaaaccatagtcctaccttcagaatatatctagaatctcaccacttctcatcaacccaactactaccaccctagtccgtttcaacactgtttctcactggattatgatagcttccgtaaccatttctacacttggcttccctttagtcttcttttcagcatagcaggtagaatgatctggttcattactgtgtcaaatcccatcactcctcttttccaaatccaccagtgaattaccgttttactcaacttaaaagccgaagtctttaacacattccttagttctttgaggtgcccttttttttctcttttctttttgagatagggtcttgctctgtcacctgggctggagtgcagtggcacagtctctgttcactgcagcttcgcctgctgtgctcaagtgatcattcttcctcagcttcttgaggagctgggactagctagagtagctggggctgcaggtgtgtgcccctatgcttgctagtttttgtgtttttttttttaattttttttttgtagagatgaggtctcagtatattgctcaagctgtgagagtgcctttttaaaaaatttgcatagaggtgttctgtgtcttagcagtgacatacttgaaggatcctcaaacactaaaatacccctttctcaaaatgctaacgattaggtatgtattgttttctattaaatagctcctgacatattcagtgaattgattggttggttcttttgccgttcctcctgctctgacccccaaatctcagttttctttactatgggtccctttgtagctggtgtgtcctcttattattatgtatttatcattattgtatatattgtatatattttcacattgtgttgtaatatcatctatacatatttgagtctgccattagactttacattcctgtattctaagggatagtgtttatgcccaagaaatttttcttgaaggagtgagtgtattttcagttacagttttaagtgtcattgtatcatccgtaaggatttggatttgtatgcaaataagagaaaacttgataaacattgacttaagcaagtcaagatttaccttctcatgtaatgtgaagtccagcggagacaatccaaagctgatgcagctgctcaaggatttcatccaggaaccagtatcctcctttcttcctagcttaaggtttttgtcttcatggtcagaagatggctgttgtatctctgaacactgcatcagaattttagtaaggaagaaaagggaaggataaaaggaaatgtctttttacaaggttttgcatttttgttctcatagatggtggccccttagaaactgatgtctatatttcactggccagaataatatcatatagccaatcctaagtacaaaaaaggctgggattttgagtattctgttttttattctttatagggaaagagggcagaagaggattacaattggtatttaaagtaccagaaagtagtgtaggacaagtggttaagaacgtagacctgaatttgaattttgactttgttacttcttagctgtgtgactttaacagctctctgcttctgttccctcatctataaactgtgcctagtagttggtacctatttcactttgttgttgaaactattaaatgagtcaatatatattgtgggtttaatgtgtatagtttgttttatttaaatagctaataagttgttatgattgttgtcattacctacaagcattgtcgaaactagaataataaatttatcactcaaggaattagctttatttgggataggaagaaaagagtatttagcaggtctcggtacacgcttttgagtacatgtgatggaaaacgatggtagagctttcttaaaagggctctggtgactgcattgtactactaaaaattatgtgccgagttaaaatattggaaccattttgatttactcattgacttcattttgaagctcagtgacccttagggtcatcctgaacaaatcatcattttaccaacaatcccctaaagtttagttcaatagaaatttcatctcttattgatagaatgtttatagacttagctctaaactgtatattgaaatatgatttcattggtattgttactagtcttttccaatttgtaatcactctacttttaaaaaaaaatcaattatttttcttttctttttagccccatctgctttgatatgattgaagaagcatacatgacaaaatgtggccacagcttttggtaagacaattctattgagtaaaataatcttttaacattttaaaacttatctgtaaatgtagccaatgagaagttacgtgttttaaaccaactttgattatgttacagtcatattttttttcttgacatgtctttgtagatgtggcagtttaaggctgttaacataatggctggcgcataatttctgtcaaatgtttagatttagaataggccttactgatggatttgaaaacttctgcgtttattaattgttaataggaacttttcactcctgttcttagtgatgctggacaatcaggaccaaccatgaagcactaattactcacttgtggggataggttggagaacgcagtgaagcaggctaagaaggtcatggaaaaagaatacaggattaaaaagttctgtgttcttttctttaacactttgctcaatattaactttacattatatcatgccaggttaactcatacatcaaaaaaattttttaattttaaaatttacataataccgaatttatatattttatatatttttttctggttctttagtcttggaggaatttataattttaaccacagttatgtaaacagtgcagtagtgttaagtatgttcatattattgtacaattgatctctagaactttttgtgcaaaactgaaactcgtcactcattaaacaacaattccccatttccccttccctgtatcccctggcagccaccattctactttctgtttctattaatttaactattctagatacctcgaataagtagaagtatttgtctttttgtgactcgcttatttcacttagcataatgtcttcagtgttgtagcatgtgtcagaatttctttgctttgtaaggctgaataatactccattgtatatatatactacattttgtttattcatctatcagtatacactggggttgcttcttctaccttttggctgctatgaataatgctgctgtgaacatgggtgtacaaacatctctttaggactctgctttcaagtcttttgggtgtatactcagaagtggaattgctggatcatgtggtaattttgtttgtaattttttgagaaactgccatactgttttctataggggctgcactattttatgttctcaccaacagtgcataagagttccaatttttccacatccttgccaactcttattttctgttgttggtttttgatagtagccatcctgatggatgtgtaatctgtgtatttttaattatttttgcttatttttaaacctattctgttggcatattattttagccttagtataccttgtgttctaatactccttatattctaattcatattgaaatcaggcccgtaattttatgctgaagttggatatgatatcgggcagatttatatcccttcatcatgaagagtatggggtattaacactagtctgtaagatctttcgtttcatctggagcatgatgctttagtgataggtgtattccctctgctagtcacttaaaaagctttaaataaaaatcactttcttagcttgtattatctatattctttcttataaaataaagtattaaaatgataacagcaatgtatattattgcttttaaaaaccagtcattgtacaggaagatgtaatataaaatacaaatgtccacctttatctagtttttcttacctacctcctcagaggttatcagaggaaaaggaatgattaggtattctttcagaatccttttactatttttttaagtcattttactttcttgaatactttttattttctggtatatcattgacattattatgattcacgaatcactttctgctctgtattgccaatgacattctggacatgtgggtcttgcttcagggctgatacaggtatggtcttggccttttcaggccattgttcggcagtagtgttctctttggtccataaattgacctagcatcttagcattccataggaaaccatatgtttttttcagagattttggattatgattattctggaaaattaggtgatctagagtaggctttctcaaccttgtcactattgacatattagaccagataattctttgtcgtaggtgactgcactgtgctttatagattgtttagcagtatacttgacccctacccagtaccacccctgcccatctctggggttgtgacaaccaaaaatgtctctagacattgcagataccccttgggggacaaaattttcctcccttgagaagtactcatctagcgctaaaagaacaagttcttgatattgttagaccaggattctacttctggttctgaaacttacctaacctttgtcaagttactcactctctgctgctgctgtcctgttcctcttcttcctcattctctttttactccttcaattcctcctctttttatggatttaaaagtgttgaaatacgaaatagattgtgaagtgaggtttttaattttcttgagtgtcctgtaacttacatatccattgtggcattttttaaaaaaggccctgcatcagttcagtgaccttttttcactatgttgtgaagtggaataaattactgattgaacttataaatggacaggctagggcttttcaataaatttataatcttcatgttgtctttaggtcattgttggaaagccccattgctttcttaaatagctttacctcctgctctcaaaacaatttaggcttagatccttattataatacaatttcatttttatgttataccctgatgagaacgtgtgtttttttgtttatttgtttggtttttttttttgagatggagtctcgctctgtcaccaggctggagtgcagtggctcgatctccgctcactgcaacctccacctcccggatattccagcgattctcctgcctcagcctcccgagtagctgggattacaggcgtgtgccaccacgcccggctaattttttgtacttttagtagagacggggttcaccatgttagccaggatggtctcgatctcgtgaccttgtgatccgcccgcctcggcctcccaaagtgctgggattacaagcgtgagccactgcgcccagccaagaatgtgttttaagatacccactggagagcaggttttagtagaatagaggccataatgttggcaggaactattaaaactggaggctgtcaattccaacatcaggcttgctatactgattttttttttttttgcagttttgtttaaagcaaaagtttataattatttactctttcctaacatgtgagggctatggaacttcagtcattaaccgtagcctcttgtgtcaactttctagtaacgtaaattctggctggtaagctggattcaagcagtataccacttcaaagctcatccaaattattaccactaaatcaaattggaccacatcagctgtttttccctcatcccaagtgaaaatgtctttcctagtaacaatttggagacaatatagcaggaacttctttcactttatttattcccacttgagaacccactgttacctgtatctgtagcctaactgaaatacaatgatataataagaaatctgacttttacataacgtagagataaaattggctctttgtctttgcccatttgctgcctccagcttgtgccctgtaccgtatgtctaccaagccctgatttactatttcgcttcattacaagttagttacaattaatggggtccttcagcatcgtcatctcccagcatgtgggtgatcaagcctgagtgtcaaattgccttttgagactcttggctaatccatcatcttgcaccatacttttggtctttctttacacctggttattagatgtaatgactggttctgatttgtcctggctgttcttgttatagtttattcttttttctagaattttctgattacttacagttgtttatatctactcatccttgtttacatagatataaaaagatatttatatttgttagcaagtatatacatagtagaagaaacaaccatatacatctatagagaaatacacattttttattagcagatacatatttaatagaggaaataggtacacatttatatcagcagaattaaaataattatttttaagagttgcagtgtgagtagcttgaaaatttctcaggtggacccgagatatgtgtcccttttacctctttgttatgcccacctgttgttgagcactaatctagatacttatccttctcttagtatccaaagctttgtatgcaggctggtaatggtcaagtagattagatgaatgagaatgaattagagttactggggtaagaaatactgaaaatttgtagtttgttttatatgatccagaaggcagcagacaggcgtatgttgctttcctggctgtatctactcattcatgcattcaacatttactgagtttgaattcttttaacaggatattgtgctaaacattaagggtacagagggtaaaacaaatccttgcatttaatgaccaaatagaagaagggctgattggcacatacagaaataagtacaagataagatagtaactatttctcaaactaaggcaggtctcttttggggtggtagtgaagtagtagatgctctaagatacgctcgatgcatcctgttgtcacttaagttgtatacagtggtatgtaatttgatatactttgattttacaatataatggattttatcaagtgcaatgcagaaaaatcacttgaactagtgttagtgaggacagttacttccagctatgtcccattttttttttttttgtctgagagatagtgtagtaagcctattgatgtggaataagattaggatactaaagaaaagaggattttctactagattttggaataatttcttgtatattgacaaaaaattttttttctgtttttgagactgggtgtcactctctcaccaggctggagtgcagtggtgcaaacatggctcactgcaccctcgatctcctgggctcaagcaatcctcctgcttcagcctcctgagtagctaggatcacagggacagactgccaccatgcatggctaatttttaaaatttttttagagttggggtttcaccacattgcctgagctggttgaaactcctgggctcaggcaatcctcctgcctcgccctcgcaaattgctgagattacaggcacgagccactgcacccagcctaacaaactcctctctgacttaacagcctagcttgttcttgtcatatgcacattttctatcatttattttaaagaaaagttatttgctaaaacccataatgttctccttctacttatctgtcaacccatctcttatctttattatgtaattttttttttttttgagacggagtctcactttgtcgcccaggctggagtgcaatggcgtgatcttggctcactgcaacctctgccccccagggtcaagcaattttcctgcctcggcctactgagtagctaggactataggtgtgcaccaatatgcccgctaattcttgtatttttagtagagatgggggtttcaccatgttgcccaggctggtctcaaactcatgacctcaagtgatccacccaccgtggcctcccaaagtgctgggattacggcgtgagccgctgcacccggccttgtctttttttaaaaaaaaaaactaaaaaaaaaaaattctcctgacctcaagtgatctgcccaccttggcctgccaaagtgctaggatgactggcattagcagatatacccagcccggcatgtctcttacctttttttgggatggagtggggtggggacggagttttgctcttgttgcccaggctggagtgcagtggtgtgatcttggttcactgcaagctccacctcccgggttcaagcgattctcctgcctcagcctcccgagtagccggaattacaggtgcctgccaccatgcccagctaattttttgtatgtttagtagagacggggttttgccatgttgggcaggctggtctcgaactcctgacctcaggtgatctgccggccttggcctcccatagtgctggaattacaggtgtgagccactgctcccggccatctcttatctttaataacctttcagagtctctcctttatgacttgctttgtttgaacttgctgattttttgtttttttgagacagagtctcgctgtgtccctcaggctggagtgtagtgatgcaatctctgcccactgcaacctcagcctcctgattagctacaaccataagccatgcagaaccaggcccagctaatttttgcatttattattattatttttttttttttgtagagacagagttttgccatgttgcccaggctgctgatttaaaaaaagagttaaattttgtatgtatatttcctggtaatgttaactcatttcctttttccctaagcagactgtaaatttcttcatgttgtgattcttagtctattgtatttgcttgcctacgttatgcttcttccttgtaataaaaatgaaaataaagatttagtatgttatttccttcagtgaaatttccatgtaggaaattttcagtcatacatgaagcatattttgtgattatggtaatcctagccttgtcagagttgcaagaggtgatgatactgtttttggaacattgtgcaggtcatttttcagtagatatttgcatatccgttatgtgcctggcatttacttcagtctttaggtccctgtgatttgccaaagaccactgttactttgattcttcacaccttcctcctttttacttatcttgaaagtaacaaatgtgagatgtgaaagtagttgataaccagaagggcgaaacctggggaatgtaggtttttatttttttgtttgttttattttgtattttgttaaggtggagggggaaggtaagtggatataaaaatcaactcagtttacaaagctcaagtaaatttatagtaatttggatacgtaataaaagaggtactttctctgtgggaatgatttttacagatcacctttgtaatttcttagaaatcatttttttcctgagtgttaccagtaatacttactattatagaaacctgaattaaagacatctacaaagaaaacatttcccataattatatgacccagaaacaaatactgttaacattgtggggattgtcttttgtggtttattttaaatgtacacatatatgattttttaagagaagtgggattatattatatccactgtgttatagattgtcatttttattcagcagtatgtataataacatttttttcttttttcttttttttttttaatatttttttctcataccagtttgacacttttccatgatttggtgaaaaatacttaaggagtgttttttttaatagggaggcacacaaatgtaaaaggtttaacattatagaaatatataatgtaagaaagggaaaattttctgtaatcacagttctctagcaataactatgagtagtttatttttatggcatacaaattacaataatttgtattggatggctgtatagcattgcattggattgatgtttacaaatttatttagtcaatttcttagtgtttaggttgcttctgttttattttgctatttacagataaccttgtattaaacacccttctaaatatatatttccttaggataaattcctagaagtaaaatattcaaaagggtatgtaaaaaccttaaggtttttcctgcaacttgccttctaggaaagttgtgctggttaacattttctgtaacagtagttgagattgttcatatccacatatactctttaactatgacattattttcttttgtcttttttttctctttttttcagacagggtctcattccgtcactcaggctggagtgcactggcataatcatggctcactgtagccctgaactcctgggctcaggtgatcctcctgcctcaccctcccagtagctgcatatgctatcatgcctggctaattttttcattttctgtagtaatggagtcttgctatgttccccaggctggtcttgaactcttggcctcaagtgatcttcctgcctctgcctcctaaagtgttgggattacaggcatgagccgttgtgccttactggcagtattttatttttccatcctaattggtaaaatctagtatataattttaaatcagctttttgtgactcgtgaagatgatggttttctcatgtttattgactaatttttgtctttcgttgagttttctgtttctcttttttatttcaatgaactgagtattaagggtattcgcaggccaataatatgaatagtctgtttgcttaactgagctgtaggcattagcttttctggtgttgttatgaactatctaaattgcataaacttaaaatttagggagtacagcttgttaaatttgtatacagtgtccttgatgtttgagtttggtttgaaataacttttgtgtagtgtttacccagtaagtgccctgtatatcctgttgataatgtaaaaatataagcaaaaataaatttattagattagttatgttgaaaatgaggaatagaagactaatagtcattattttgtgaccagtttattaatttttcattgatttaattaagccttttttttccccccctactaatagctacaagtgtattcatcagagtttggaggacaataatagatgtcccaagtgtaactatgttgtggacaatattgaccatctgtatcctaatttcttgggtgagtctttggaatgatttttattttaaaaatatttcgatccccaaaattgtgtgctagcgctaatttattcagaaaacctaccttagtggtaagcaagtctctctctactgtataccacagtgctttcctcttcttgggttgtgacatagattctatacattgttagtattttattatttttaagttttattaaaaaattcataaaacttttagattattgtgtatatcagggacccctgggccatggactggtaccagtctgtggcctattaggaactgggctgcacagcaggaggtgaggggctggcaggtgagcgagcactactgcctgtgctctgtctcctgtcagatcagtgggtggcattagattctcagaggagtatgaacctgattgtgaactgcacatgcaagggatctaagttgcacgctccttatgagaatctgatgcctgataatctgaggtggaacagtttcatcctgaaaccatcccttccacctcccttcagtctggaagaattgttctctatgaaaccagtccctggtcccaaaaaggttggggactgctgatgtagatgacagactggatgtgaggtttaacaaaaatggcagcagttctgaacacctttaggtatccctgtgaagtgttatacatccctactgtttctgcttttgcggcagaagtgagaaagagtccatgggtctcgggaactcaggtttgttgaatattgagggcaaggggacaaaaaaacttgggtgtgatgcttgctgagttgggagtgaatgggtgaagagaatctgaactagggaggcaattaaaaattaagaacttgggaaggaatacatggaggagaacttttgagagaggagtggtaagaactagagaagagagacatgaatagggaatccttaagtataaatgataaatgatcggaaataataactagtcagaaccaactgtgaatatcagaaaaattctgcatgttaactaccctaagatattttaggaaacctttaatctgaatgttttgggaatgaataataagctaaagaataattttcaggtatgagtaggcatgaagtagggcactcttgggattatatatcaaaaaggtcaattctgcattttaaagactaatatgctcagagttagggtgtggtgactacttttgtattagattctgacctgctagtactttggtggcagtttgatttttagctcaaattgttgtttaaaataaattatgaatttgaacgtattcagctatggttttcctttttatctgctctaaaagtgccttagctacaatagttttttctctgttactcttcactgtaattttttttttatgaaggaaaatcgctggaggattacatagcagaaaggggtgcttaaaggaattgaagattttctgctagaatgacaaattcttctaagtggctaaagttttatggcaaacttggagaaggaacttaggaaaagaacaaagagaaatattgagtggcatggtaccttgcaggatgatacttgatggcctagtttagataatagggaaaccacatcctgtagggcaaaatcctttgtccctgtgcttgtaaatttggattgatgctgccctgtggaatctaggatcactaaagatgactatgctttttctgtagtcataactttggaaaactacttactcttttggagtggttaaatatataaaggaatgtgatgttctgaagattttggtgtttactagatttttcaggcaacattccttagttcacaagtttgaaattctgttttgtgagtttctaaatagtgagagagagttatatatgagtatggaaggaatataaaaatatactgccacttaagctggaaagtgatcccctacattatatatattctcttttttttttttttttttttttgagacagcatctcactctgttgcccaggctagagtgcagtggcacgatctcggctcactgcagcctccgcctcccaggttcaaggattctcctgccgcagtctctctggttgctggaatcacagacgtgcgccactgtacccggctaatttttgtgtttttagtagagacggggtttcaccatgttggataggctggtctcgaactcctggactcaagcgatcctcccgcctcagcctcccaaagtgctgggactacaggtgtgagtcattgcgcctggccttagatattctcaaatatatgtatctaatgaacagtgaagtcacatttactgatttttttttttttttgagacagcgccccactctgttacccgctggagtgcagtagtgcgatcatggctcactgcagccttgatctccctggttcaggtgatcttcccacctcagcctcccaagtagctggggctacagacatgcgccaccatacctggctatttttgtttgtttgtttttgtagagacaaggtctcactatgttttccaggccggtctcaaactcctgggctccagtgatcctcctgcctcagcttcttaaagtgtcgggattacagatgtgagccattgtgcctggccaattactggttttttttttttttttttttcattttgtttttttgagacaaagtctcgcactgtcacccaggctggagtgcaatggcatgatcttgactcactgcaacctccacctcctgggctcacatgattctcctgcctcagcctccctagtagctgggattataggtgcacactaccacaccctgctaattttttgtatttttagtagagacagggtttcactatgttggccagactggtctcaaactcctgacctcgtgatcacccacctcggcctcccgaagtactgggattacaggtgtgagccaccgcccctggcccaattactgattttttaagctagaagttatcttgacggtgatctctagtgcagctttcagtgggattatattgttgtcaactgtggaaataacatttcatcctgatacatctatttgtgtttttctgctgattacctcttctagccatgtcctttgttcagtgatagccaaatcctaaggtcttacactaggtgtgtagagactgtctcctgttggctcagagtaatgtcattgagatatgtcgatccatgtgttcctgaaagtggaatatcacttgtttttttctatactaaaaaatgttttctaagttattttcattgcttcagcttaagacggcatgatttgcataatgcctgcagttcttagttgggttaagaagacctagagccttttaaaatgatttcagatttcctcttagcctggtaaagtaatggagcatatgttatatgattctgagatgttcttggcatccttgcacctacttaattgataggttaagaccttacacttccaatgcctagtcataggtagaggactggtccacacaatttctacagcagtactctttaaagctttttgcttgtataactcatatgaaaattttgaaaagtgatgatccgtgcatatttttaagtttgcattaaaattttttcgtcataactttaagtgattgtaaagaatacaattttggccaggtgcagtggctcaaacctataatcctaacactttggaaggctgaggcaggaggcttattcgaggccatgagtttgcgaccagtctgcgcaatatagcgagaccttgtctctataaaaaattagccaggcgtgttggtatgcagctgttgtcctagcttcttgggaggctgaggtgagaggatcatgtgagcctgaggattttgaagctgcagtgagctatgattgtaccattccactccagcctgggcaacaaagcagagactctgtctcaaaaataattaaataaagttttaaaaaagagagtaaattctagagtattataaaaatgattacttcagaactgttttatcactttttaaaatgtaaccggtggaatctaaatgtcatagtgatttgttacttaaatattgatttaaaaatatataagtaagctttttattcaataccagaaatttcattcattacctttttttgtgaacttctacttaaacttcatatcacacacatagttttatccttataatctatttccgtgcttgaaattctgactaatctgcctgtagtacttttctgtaacaaaattgtatatacaggcatacttttattgtactttgctttattgcactttatagaagttgcattttttttaacaaattgaaagtttgtggcaaccctgcattaagtctcttgatgccacttttccactaccatgtgctcacttcatatctctgtgtgctcagaagaatgtcactgagatcttttagccaaggtgtgaatgcaaaggaaaagttcttgaacgaaattaaaagtgctactccagtgaagacacgaatgataagaaggcaaaatcgcttattgctgatatggagaaagtttagtagtctggatatataccagccacaacattcccttaagccaaagtcttatccagaacaagaccctaactctcctaaattctgtgaaggctcagagaggtgaggaagctgcagaagaaaagtttgaagctaacagacgttggttcaagagatttaaggaaaacagccatctccataacatagaagtacaaggtgaagcagcaagtgctgatgtagaagctgtagcaaattatccagaagatctaggtaaaaatcattgttgaaggtggctatagtaaatgacagattttcagtgtagatataacagcctacttttttttttttttttttttttttgagatggagtctcgctctgttgcccaggctggagtgcagtggtgtgatctcggctccctgcaagctccacctgctgggatcatgccattctcctgcctcagcctcctgagtagctgggattacaggcgcccaccaccaagcccggctaattttttgtatttttagtagagatggggtttcactgtgttagccaggatggtcttgatctcctgacctcgtgatccaccagtctcggcctcccaaagtgctgggattacaggcgtgagctatcacgccttgcctaacagacttcttttggaagaagatgccatctaggactttaattgctggagagggaagtcagtgcctgccttcaaagcttccaaggacaggctgactctcttgataggggttgatgcagctggtgactttaagtgccactgctcatttaccattttgaaaatcctagagcccttaagaattatgctaaatctaccgtgtctgtgctctgcaaatagaacaacaaagcctgaagacagcatatctcttttcagcgtgatttactgaatatcgtaagaccactgttgagacctactgcttagaaaaaaagattcctttcaaaatactactgctcattgacaatgcacctggtcacccaagagctctgatacagatgtacaaaggagagtaaggttgttttcatactgctaacacaatatccattctgtagcccataaatcaaggagtaattttgactttcaggtcttattattgaagaaacacatttcataataactgccatagtgataatgagtcctctgagatctgggcaaagtaaatggaaaaccttttggaaaggattcaccattctagatgccattaagaacactcatgtttcatgggaggaggtcaaaatatcaacattaaaaggagtttggtggaagttgattccagccgtcatggatgactttgaagggttcaagacttcagtagagggagtaactgcatatgtggaggaagtagccagagagctagaattagaaatggagcctgaagatgtgactgaattttcctgtactatcctgataaaacttaaacagatgaggaattgtttcttatggatgaacaaagaaagtggtttcttgagatgaaatctactcctagtgaagatgctgtgaacattgttgaaatgacatcaaagaatttagaatattacataaacttagttgataaagcagcaagagggcttcagaggttgactaactttgaaagaaattctactgtgagaaagatgctatcatgtaacattgcaggctatagagaaattttttgtgaaaggaagaatcagttgatgcagcagtcttcgtcattgtgttcttttaagaaattgccacagccagcctagacttcagtgactaccaccctgatcagtcagcagccgtcaacatggaggcaagactctctaccagcaaaaagattatgacttgccaaaggctcagatggtcattagcattttttagcaataaagtattttttaataaacgtatatattaatactttttttaaagacataatacttaaactacggtatagcgtaaacagaacttttatgtatattgggaaaccaaaattcatgtgacttgctttattgtggggcctagaaccgaacctgcgatttctccaaggtacgctttgtatatagaaattacacacttaaaagttttttttgaacttaatttcctcttaagcattaagaagtcttaaatatgtttcctatgttgttatttaattagtagtagtatacaattgatcaaacaaataaatattacacataattttatgaagtcttagacataaaattctatagtgaatgtaccgtttaccaaggtgtgtggtatccttctccccaagtagtttaagtggcattgatgaatattactatgacgaggattccatttcctttgtgtaatttttatttttaaatgtgtgagtcttgagaaaccttgtttatattaattaagttgatgggacttgaaggcgtttttacagcaacatgactcatttctttgccttccttttgaattttgtgctaaagaagcacttactgatttattgtcacacaaaaaattttagatgccctattaacaagtcaggcatttttttcaattttgatgaaaagaaagagttggaaaccaaataactcaagatggatttggtttcttggtcattagagtcatatacattttcattgagatagataatatgattttctttctttcctgctgtaagcactacactatagcccctcttcctcctgacttcccttccctgcatctttctctaccttccacagcattttctctcattctcttctgtttctcccttacttccctccagtgtgcatactctgtctgctcctctctgcctcccttggttttgaatgctctctttccctctcctgatcctgaaaggctgattcaggtaagggctggaagtccgaccctccattaccacccctccccattaccactccctatatactctgcaggtgtactccactcctgccaaagcttgctttctaagctcccttgcttgcctgcttgcttgcttgcttttttcccctccctccctccctccctcccttccttcttccctcccttcctgccttcctcccttcctccctccctcgcttccttcttccctttcttccttccttcctttcccccgtactccccccacccacccagctgtctttttctctacctttctctctatatataaaatttgtaggtcaggggtggtggctcacgcctgtaatcccagcactttgagagtctgacacgggcggatcacgaggtcaggagttctagaccagcctggccaacatggtgaaatcctgtcactactaaagatacaaaaaattagccaagtgtggtggtgcgcaccggtaatcccagctactcgggaggctgaggcaggagaattgcttgaacccaggaggcggaggttgcggtgagccgagatcgcaccattgcactccagcctgggcgacagggcgagactctgtttcaaaaaaaaaaaaatcgtaaattgaattttcttacctctctaatgaataatcctcttaaccactaataaaaaatacagtatgcttgcaacgtgtaaaatccctgtttaaaaaaaaaatggctgatgcatataaaagtccttactactgtcagtcactgttttcaatcctgtatgtacatgaagtcaatccttatggcaggcttgtgagatgggtactgattttatcatcctcattccttaggtgaggaaactaaggcatagacaggttgagtaacttgtgtcaagttatacagccaaagtggtgaaattagaatttggtcttaggcaatttggctcaagcatctgtgcttttactgtactgttctgcctctaaaaagaccgttgcttgaatggagtctttagcattaaaatgcatttttttttgtactaagaaatgtttgttcttagtactgtggatgttgtaaggctctgtagaattataattaacaaatgtataacatccttaggtttaggtatcaattctaagaattggtgatggtttcaaattaaggcttatcttaattggaaatgtgaaagtgttagctaaacgtggcatgtcacacttaaaatccaggagcatgtcatcaagatttcattcattcattcattcattcattcattcattcattcagcaaataccaggcgcctactatgcgtcagggaccacgatggtggacaagacagacactgatcattaaatgctttaatctatagtataaataagatgctagctgatgtcttctgctaataggtaagcattgcttttaaaataagttttcaaagttatggaatggaattcaccattttgctattcttgtttgtaagctgtgacatagttttgaaagggttttcccactaagtgtgtgactctaatgactttcatatatacatatatagacatttgaatgttgagtccagtgtatataccttgcattttaagagattttcttctgttaaatttttgaagtacaaaaataataaaataccccttgatgaggaaacacttaagctgagtgtactaaataaaataacttcttttattttccataggtaaccattgtttgttgtaggatatagttttttaaaaatttttatttttttgagacagcgtctctctctgtcatgcaggctggagtacagtggcgtgaccatggttcactgcagcctcgaactcctgagctcaggcagtcctaccacctaggcctcctgagtagcggggaattcaggcatgtaccaccacacctgggaaagttttgtatttttttgtggagacggggttttgctatgttacccaagctggtctccagctcctggctcaagctgtttgcctgcctcagcctccctaaataatgggattataggcatgagccactgtgcccagcctaggatatcgtttttcaagaagaaaaaaataaccattttttcaagtaactccatgaaaaatctgatacagtagtaaaaaacttcgtttggtaaatgtagaatttaaatgtctttatatgacatggcaagacagttaatacattgtttgtttacactttatttttgccatcatttgctgtaactttattttgtaatttaattttgtggcctttacaggcttgatctaccttggctgggcatggtgtctcatgcctgtaatccagcacttgggaggccaaggtagacggatcactcgaggccaagagttcaagatcagcctgggcaacatggtgaaaccctgtctctataaaagattcaaaaatttgctgggtggagtggtgtgcacctgtagtcctagctactgggaaggctgagatgggaggatggcttgagcctgggaggcggaggttgcagggagccaagatcacgccactgcactccatcctgcgtgacagagtcacaccctgtctcaataaataaataaataaaataaataaatacaggcttgatctttagttaatagagttgctcttgaaaaaaatgtttgatcttacagtattgttattgagaatcaaatataatggtatataagattttgtggtaaaattcaatgcggcatattcatgtaaagtatttaacagtcactatttttcttcaaatggttaaattcataactgtgacactgacctcttactgacttactcctctttattcccactgaattatttcatgctctctcctttatctggattataatcacttttcttgtgtaaggtatctgcagttcaggcccttcacaatctggctctgatctgcctacatttccaggcttagttcttaatccctgtgaatcattcacaagatcactctgacccttgttttagctatattgattttacttacttacttgtttatttatttatttattttgagatggagtctagctctatctcctaggctgcagtgcagtgacacgatcttggctcactacctcctgggttcaagtgattctccttcctaagcctcccgagtagctgagactacaggcacgtgccaccatgtcaggctaatttttctatttttagtagaggcagggttttgccatgttggccaggctggtctcgaactcctgacctcaggtgatccacccaccttggcctcccaaagtgctgggatgactatattgattttaaatcgttgtatctcctacacacacacacacacacacacacacacacacacacacacacacacgacacacatctctctctctctctcacctgaatttttcttcacttttatttttgcttagtgagcccctgtgtgcctattatggcccatttctaatgttgccttctatatgaagtgtgcttgttaacattttgattgatctctgcgtgtatactttgtaaatctattttaatgatagtactgattatcacattatattacaagtactgtatcatatgcatctgtcttgctagtctgagttgcttgagaccttggattgtgtctttgaagcttggatccttatgagcttggtatctgtttgttgttttcaaaaatatttatacttgcattgtgatatactgggaagtatcagacagttgggtctatattctcagcattgtctcattgtatatgtcaccatgcataagttacttatgctctctgtgctaatacttcttcatctctaattggggaaaataatctgtaagatattgtctataaagtgccttcctagcctagtggtagtttccctttttaaaaaaaaaatcagttttttgtgtcagtttatatttgttggttgtagaaaaatagaaagatccaatttaaagtggttaaacattatggaaaatgtatcgattcacgggaaaagaatttctagaactagttatcagtggttcagtggtattgtcaggttctttctcttgttcttttcttccattgccagcatataccttggtcttttggctggctattcttgaggttgcaagatggctctaagcagttccagatatcatccccttatgaaggcatggtttttttctcctatcctttcctttctgaaagatagcacatctctctttggtcaaaattgggttacgtacttaaccccacatcaaccactggcaagggcatgaatgactagattgccttaggttagtcaaagtaatacatggggttggggtggaatctaacctctctgaaagttatatggcagtctgacacttggaaaaaagtcatgttattatcaagaaaaagagtaggatggtttttggatagttagctaaaagtgtcttccatggtatttttagaagaattacaaagaaaaagaacaaatgcaagtctttagtacttaactcatagtagatactcagttactcatgccttgttaccatatggggcatgtgatggtctcacatggtgaatgaggatttctctctcagcaagtgccaatagcgtcatcattgagaaacatgtaagggaaaatacatattctgaagaattctcctatagtaatagtagttgtagtagtagcagctgcagcaaaactgttttctaacttgaaataaaataaaaagctaacactttctgtttagcatgttttgaatttggaggctatgtataggtaaaatagaatctatctaaaccgaagaattacatgatacatttaacaaaaatacaaattatgtgtgctttttattttgtttctgttttcagtgaatgaactcattcttaaacagaagcaaagatttgaggaaaagaggttcaaattggaccactcagtgagtagcaccgtatgtttcaactcttattactatttttaataaatttcattttgttgtttttattggtttaatattagttagatgttaaagtttagtatattattgatttttcttaaaaggcgattgtttaggattgttctagtcaaataactaactttcttaactgcattgtctgtagtactttactagagtgatcctattttgaaaggtctggtaggattatattgaaacatttgtctttgaatacttgacatttgaaggattattttgggtggtgaaacaatggttagatattttcaaaaaactgttgaggttgggctcacacctataatcccaacactttgggaggccaaggtgggaggatcactcaagcccaagaatttgagactagcttgggcaacatagcgagactttgtctatattcaaacaaaaacaaaaacaaaacaaacctttgaaagattctcaattttaaaggcttagtcccaaattatggaggcaaatgagcttaataccttactacatgcaaaattgaaaatatggctagacaaataattaaattcagtcattttgaaggtaaattacagctttagaatagtctcaaaggcaccttttatatttgttatctaaattcatttaagggagaagaaatagtgtttaagttataactgtaagacagtagggagccactagctaggaaggggtagtttggaacattataatatattttcgatatctatgtaatgagcatattaggaagtagcaagtaaacatttgttttagtctctaaaacagtcttcataggaagttgttgtgtttcttctttcttcatttttagaatggccacaggtggcagatatttcaagattggttgggaactgaccaagataaccttgatttggccaatgtcaatcttatgttggagttactagtgcagaagaagaaacaactggaagcagtaagtggtagctaaacttaaaaaaaattttaaatgatgaactttattgcaataaaaaagacgtagaaagtttaaaaataataggatagcttcactaatccattcatttttactcagctagaaacagctacaaagtgtcacttctgctagattccccctttttgtaacttaaagaacaatttcaatacattataacttatttgcaatgaccagtttttattaacaaaagctgagtgttcaaaatcttgagaaagtaaagtttcgttttcataggaaatagttttgttggttatctgtcttctaatgagtatctttcttaccatattgtcccctcttcatatgtgagatttggaggagaaatagagattatttttatctacatacagttctttcagcaggtgtccattggtagcagtagtagtctatggcataactaagagcatttaaagagatctgtactaaatatatcttatttaatgtaatgtaaaattccatttattttacgtaactgttaaagacgtaaaatgtgaaattgcaagtattgggaattgagtgtgatatattataagcaacacacaccttagcataagcaaatactaccctgaggttaaacataaagggagtatttattgagacagtaagtgagtgagtaacacatacacacaaaaaagaatagttgaaccaccaaactttgagaagattagaaccatggcttctctggaagactacaagtacatgagatagggatttgaatgttgttgagagtctttcttttgtgccccttatgcctgtttgattgggacagctctgattttcttttcttgtagacttttttatcacatggtggataataatgtcatttgcactcttggtttatatgtatgttttttgataaaagaaaaaaaggagcttttgtttccaactgcagtttaaagatttctgtggctagattatgattaacttagcttggatctggatcccactgactgtggtggggatcttctagtaggagaaaggtgtgtcaggttgagccagccaaaataagttgtctcccatgttatatctgtttgggaggtcgggtaaatgggaatttctcttacggttttaaccatagtttactattagcatctactgtttgccaggggttgtgttaaggtctgtggacaagctagagttctgctgtatgtgtgtgtttgtgaactaaatcagtaaagcaggtattttcacatggtgataagtaatataaaagactttcttttttttttaagggacaaagtctccctctgtcacccacccagtctggagtgcagtggtacagtcatagctcactgcatcctctaccccctgggctcaagtgattctcctgcctcagcctctcactcacaccactaatttttttagtttttaaatcacccaactagtttatttttatttttattttttgtagatacaggtctcactatattggcctacagtagtctcaaactcttggcttcaagcaatcctcccacctcagcctcccagggtgctgggattatagggtgagccactgcttccggccctaaaatgactttttatgagagattgaacatacgcagttaccttgctcccttttgaaatgatgaaaatgacagtaaattagggattttaaagaggcaaaaataaataaaatgagataagatatattttcaggaattttttctaagctatgaaacagatggacaaaaggtaacagataagtagatctgaggaaactgaatgctacaccagcaatagggagaaagctaagaactgaccctatttatattgtggagcagaggccctgggattgggaccatcaggtatctgacagagtaaaggctgaaaacaatgagtggttgagaatctgtttaagaagcagttggaatccctgattccttcttatataactaagctaatgattcttccttttctactttaggagaaaactataatttttaacccctccacccccaacggaggtggtaagaaagaagctctctggactgcttcataacaggcacacttaaagatgtatgtgggtgttcctgtttctccacagcctcgtcagcatctgttgtttcttggctttttaataattgccattcagactgatgtgagatggtatctcattgtggttttgatttgcatttatctaatgatcagtgatgttgagttttttttcatacgttttttggccacataaatgtcttcttttgagaagtgtctgttcatatcctttgcccacttttcgatggggttgtttattttttttcctgtaaatttgttcaaagttccttgtagattctggatattagatctttgtcagatgggtacattgcaaaaatttttccccattctgtaggttgcctgttcactgtgatgatagtttcttttgctgtgtagaagctctttagtttaattagatcccatatgccaattttggcttttgttgccattgcttttgatgttttagtcatgaagtctttgcccattcctatgtcctgaatgatattgcctaggtaacaaacctacacattctgcactcgtgtcccagaacttaaagtaaaaaaaaaaaaaaaaaaaaaaaaaaaagatgtgtgtgggctaccataccaaaagcagataattacatagtgaaagtgagaactggtaaccttcttcctaccttctcatatgccagcattagtctttgtttcctttttggcttcgaattgaagaaacacagttgtcttattagattacagattctttcctattattttctgaagagggagccacctcagaagcaaagttcctgtcatagatttttttacattattgctttctgttttacttttcattattatttaacctgaatctttccagcatacagaaaagtacagaaaataatatggggctctgaaatactccttcctagttttaataaatgtgaagattttggcgtatgtcttagatctgacttaagaagtaattattttcatacttaaacccctctcatctcattcccttctcccagtgtgaccaccatatgaagttggcaagaatccttctcaagcatgtgtatgcgtttcttatgtatgttagtatctacaaccatataaagtagtttgcataaattagaggtttatataaagggtttcatgctgtagttatccttttgaaatatacctatttgtttactttttgaggttcatattgataagtgtagatttggtttatttattttaaattcttatagtaatctgtttcagaaatatatctattattctattgatgggcatttaggttcttctcaattcttagttgtgtcagcactacatttagtatacctttctccttgtgctcgcattagggtatgtgtgcacattttaatcttattaaatatttgatattgacagattgctcttctgtggatttgtgccatataagcacttggtattttctgttttttagttactgccagtctgataagtatcaaatgctgtttgtgtgtgtgtatgtgtgttttaaaaatacatttctgtaataaccagtacagctgagaatttcttcatttggccacccttgttttctatttgatgaattacctattcatattttgtgtccattttcctgatggatcatttgtcttttctcttactgatttgtgtatgtgtgtgtgcttgtattttgtatattactactttgccaagtatatattttggtaattgaattctagttgaattccattatagttggagaacataatttacatgattttaggtgattccattttagatgctttgttggttcatcacttataattttttgtctttttagtggttgctttagagtttttaatacaattactaccacattctacattaaagtaatattatactacttcatctgtattacaagaaccttaggccaggcacagtggcttacgcctgtaaccctagcactttgggaggccgaggtgggtggattgcctgagctcaggagttcgagaccagcctgggcaacatggtaaaaccctgtctctactaaaaatacaaaaaattagctgggtatggcggtgtgcgcctatagtcccagctacttgggaggcagaggtaggaggattgcctgaacccaggaggcagaggttgcagtgagccgagattgtgccactgcactccagcctgggagacagagcaagactccatctccacaaaaaaaaaaaaaaaaaaaaaaaagaaccttaaaaacagtatactttcattttctctctcctggccattgtagtattttatgtcatatattttacttctaaatgtgttatatattccacaatacgttgttattaattgtggttaaattatggagatttctagcaagtcttatattacccatttatttaccatttctggtgtcctttattcttttgtctagattggtttctatctgttattttcctttagcctcaaggacatcatttaccatttctttagtgcaggacggcgagaggcgaattatttcttttatatgtctgacaaaatctttattttacttttgtgtttgaaaggtactccatataagtataaaattccagattggcttttaaagaaatgttgctccactgtctcctagcattgtttcagatgaaaagtctgctgtcattcttatcttttgtcttcttaatgaaatatgtttctcccagtttaagatactctttttatgggtgtaagtgttttgattatgatgtgccttgcagtagaggttttttttttccccctttgtgttttttgttattgggttctttgaattttttagatctgtagatttatagtttgcttcagatttagaaaattttcagccattatttcttcaaatatttttatgtcccctcttccactttgggaattccagttacatatctcttaggctagttgaagttgttctttaggtcattgatgaatagttttgttcattttatttgatcttattcatctttctagtgcattttggatagtttctattgctgtcttcaattttgctccatatagattgactttttcccttattgtaggatatatttttctgcttctttgcatgcttgtttcttaattagatgccagaaattataaatttcaccttgttcagtgctgaatatttttgtaatcctttatatattcctgaactttgtcctgacatgtagttaagttacttggaaacagtttgaatctcttgaagcttgtttttaaggtatgatagggaggagcagagcagttttttgtctctgctagttttgcctcactactgagacaacctttttgagtgcctgatgcatgtatatttcttggtttttctactctggctgctgggaacatgtaatatttctggccctttgtctggaaagcattgtttcatatagttggacaggtgttttgttgtttaaggcaggaatgtaaatctagtcccttttactccattttggccagaaggggaagctcaatttgcatgtgtttagtcctttgaaattgattgtgatttcattgtagctcagcataatctgttttgtaaatattccacttgcatttgaaaacagtgtttttattcattgtagttctttataaatatgattatgtagtgtgggttaatattaatattattgttgttgttattatttttttgagatggagtctctctttgtcactcaggctggagtgcagtggcgtgatctctgctgcaacctctgcctcccaggttcaagagattctcctgcctcagcctcccaagtagctgggattactggcacacaccacccccctcggctaatttttatatttttggtagagatggcgtctcaccatgttgaccaggctggtctcgaactcctggccttgggtgatctgcctgccttggcctccaaaagtgctgaaattactggtgtgagccaccagacccagccagttaatattattaaatttgtttttcctccttgctgtcagttgctgacgagtgtgttactgttattattataattgtctacttttgttttcttttttggtaatttttgcttcatgtattttgaaaccctgttattaggtgcagctcatacatgtttagaatttttatatcttctggatgaatcatctcctttattattattatgaaatggatatgtttattgttggaaatatttattgttctgaagtctgctttgtctgatactgatagagccacagcatcttacttatagttaatgtttccatggtatagtcttcttcatgcttgtactttagttctgtcattgtccttataaagtgtgtgtccttaacagtaggtagtatttttttctgttctttttaaaaacacagtctaataagtgcagtgaattgaagtgcttaagtccatttaaattttatttaatataattattgatatagttcggtttgagtctacaccatggtatttgttttccatttctccctcctgttctttatcacttcttcctcctttcttgcctcctttagacatcattgggttttcagtatctcattttatcttctctatttttcatgtacttctttttattgtaattttagtgttttctctaaataccacaaaaggccttttctcccacacagtttatagtatgctacttcaaggacaatatgtttgcaggcaatcttgaatatatggtataccacataactcagtttactaaacttcccctttttttggttcaaaccatgttataagtctcaccaaactttttttttcttttttaaaacattgttattttggcttttgaagataggataccaaaataaataaataaaaaagaacaaaaacccaccagaccctttttttatttacccaaatatttaccttttcagatgctcttcattttttctcgcatccatctggctgatttcccttttacttgtataacttttttactatttcttgtaaagcagattgttttgctctatatagaagctttgggttttctttttaaaacactttaaagatattttcactattcttttgtttctgatgaaatcagtagtcatttttaccatccttctcctaaagctagtatatcgtttttctctctaactgcttttaagattttctttctgacattggttttcagcaatttgactatgttattcctacattttattatttttatatttattcttcttgggtttcatgcaacaagaggatctgttctttattttattttgttttttggcagcgaacaaattcaatgcctaggatttaatttttgaacatagtcagccattacttgttcagccctttgctctccttcctttccctgtaggtttctagtcatatgttgttataatgtttcatattatcttacagacttctgatgctctgttcttattttcctttttttcctgtgaatttaaataatttgtattgaactgtgtttgagtttgttattcctttcctctgctatgtctgctttgctcttaatttcatcgatttttaaatttatatttatttacttataaaattatttatttattttagtttttaggagcaaggatgagagactgacccctttggttttattcaggaattcagcttaactggggcttcatcgctgcttgagttagtttcagtcattggctttaaagaatagtacgcattttttgatttatccctttttttgttactgtggaagtaaccttttacattttaatctgaagaggattaaacactaattttttttaactgaaatgatttgtactgtgaaagtgttgtctgtgatgccagtgcttccaaatttaagtcactcattttatgaactgttgtcactttttgtaaatattcgtcttatgcttttaagcatgtgtgttctgaaattgtttcaaggatttgttctttatgtctaataatctttctatttaaaattttctattaaaattatttaaaaataaaaacccagctaatgcagaagaaagtatattaatttactaatgtgattatggatttttcaattttctttccaataccgtcatcgtctagtttcatatcctttcagtctttttgtatttaacttttaagttcaggagtacatgtgcaggtttgttatatataggtaaacttgtgtcatgggggttcattgtacagattattttgtcacccagctattaagcctagtatccattagttatttttcgtgatccttttcctcttcccaccctctaccctccgataggccccagtgtgtattgttcccctctatgtgtccatgtgtcctcatcgtttagttctcacttgtaagtgagaacatgtggtatttggttttcgtcctgtgttagtttgctaaggataatggtttctggcttcatttatgttcctgcagaggacgtgatctccttttttatggctgcatagcattctatcgtgtatgtacaccacattttctttatctaatctaccattaatgggcatttaggttgattccatgtctttgctattgtaaatagtgctgcagtgaacatacatgtgcatatgtctttataatgcaaggatttgtattcctttgggtatcctggtcacatacaccctttcaagactgagccaggaagaaattgaatccctgaacagaccaataaagagctccaaaattaaatcagtaataagtagccctgccagatatacaaagaaaagctggtaccattcctactgaaactattccaaaaaattgaggaagaggcactcctccctaagtattctgtgaggccagcatcatcttgataccaaaacctggcagagacacagcaaaaaaaggaaacttaagaccagtgttactgattcacatccatgcaaaaatcctcaacaaaatactggcaaattgaatccagcagtacaccaaaaagcttatccagcatgataaagtaggctttatctttgggatgcaagactggttcaacatatgcaaatcaataaatgtgatttatcacacgaatggaactacaaaagatagaaacaacatgattatctcagtagatgcagaaaagactttcaacaaaattcagccctccttcatattaaaaactctcaataaactaggtattgaaggaacataccgcaaaataataagggccatctgtgacaaacccacagccaacatcattaaatgggcaaaggctggaagcattgcccttgaaaaccaacacaagacaaggatgccctctttcactactcctgtttattcaacatggtgatggaagtcttggctggagcagtcaagcatagaaagaaagaaaggggatccaaataggaagagagtaagtcaaactatctgtttgcagatgacatggttctatacctagaaaatcccatagtctcagccgacaagcttcttaagctgacaaacaagttcagcaaagtctcagaatacaaaatcaatgtacagaaatcactagtattcatttctgtcagtacaaagacttgggaactacctgacttataaaaggatttgttatctagtctttagagtcatccacttttccaaactgtagtattttttattgccttattttgttattccagagaattttataccccagggacatgtataaggtaaacttctgggtgggtaaaagataagtgacaagcctacctgctttgctgccatcccttccttacaaccttctgtacaaagtgagaatagaaaatttgatgaaagaggctagaattgagaactggagtgatgtcctgtgagcagacatgttttagaagaagaaaaggtagatggtggagaattagggaatcaacttcctaaaaccctctgtgtccacatacgctttggaagatcttcatgcattctcaggtatatctgtacccttatttgaagtctgttgtctatacaagcagaagtgaatatcctttagaagttttctgttgacagtagatttaaggaaaatactgtagtgttctagagaaaaattattacctaaatagtaatatcctatctaaagtatgggatgatgactcctgtttgtgaaatgttacctgcacattttataggtagggaatctgaacccaagtaggggaaacacacataaagttatctagggtttttttggttagaattttaagctgggcacagtggctcacgccgtaattacggcactttgggaggccaggaaggcagatcacttaggagttcgagaccagcctggccaacatggtgaaacccagtttctactaaaaatacaaaaattagctggacatggtggtgcgaatgtgtaatcccagctacttgggaggccgaggcagaagaattgcttcaccttggggagcggaggctgcagtgagctgagatcgtgctactgtactccagcctgggaaacagagtgaggctctgtctcaagaaaaaaaaaaaatctaagtaataattacttctaatttacaatgtcataacattattaacaagatttatagcaaatagcaacagttcctagttccattactcccagtccctgatatcaattttccagaaggaatcttttcaatttttaattgtttttatttactgcacacactctctattatgtataattttttttttttaggagagagaaggtctcgctttttcacccagactggactgcaatggtgcgatcactgctcactgcagccttgagcttcccaagtagctgggaccgtaggcacatgccactatgcccagctagtttttgaattttttgtagagatggggtgtcgccatgttgcccaggctggtcttgaactccagagctcacgcaatctgcctgccttggcttcccgcagtgctaggattttgcagccaacaattctatatttctaaataacttgcgtatgccattctgcttagaaagtctgatgcaaaaaaaaaaaaaaaatgccctcaaaatggcagttgttctactcttgagacaactgttgtagagtgaactgtacttgggaagatgaacttatgctaactaaacctgtaaggaccaaattactcatttatagtgaaatatttaaaaatcagttacattagttatttacatagttatgaccaatgtgttttctcccagttggaaagacatctaacttgccatataaccgaaggatactaaagcatggaattggaataagaagagtttaataggcagttcacatatttaattatattaggctctgatcaggcagttgcttccattcccataataaggataattttttcttttagaatacaacaaaatttagttgcagagaagggtaggaaaataaagaagaccaatgttctataaaaactcgaagcatatttcatgtcacatagcagatacgctccctcttgagacgcttaactgaaccagatgggacaagtgtaacaaaaacttgctgtattgtagagtactgagagtagagagtaaaattctaaatatgtttctttctttctttctttctttctttctttctttctttctttctttctttctttctttctttctttttctttctttccttccttctttctttctttccttctttctttctctcctttctttctttctctccttccttccttccttcctttttctttctttctctctttctttctttctaaatacatttctctttattctttttcttacacgcttccttatccgaaaatgggagaattgggctaaatgatcattacatgttttttggaagttttgacgattgtaagagatgtttagagaattgacttcttggactttcatttttagtggtgggattactttcatgttaaaaatttgcacctgttctaatagaacattatatggctagacattttggtataattggttatactctttccattttttaaagcattctcttttcttccactatctcttttttataattttccttcatatttatatgtgaaattgtagtttcatatttgccattcatctcttttcttgaaattattcctttaaaaagattaaactgcagaagaaggtgtcatgtggtgaattcctggtgtatgtagttggacccactttccttttacattgacattttggggactttctccttctttctacaagttaattgcattcttgtcatatttacatattctagttaatagattgaaatgaagtgttcagatttataattttgaagatagtttgtataattcctttgtaaatgaactgtcactttattaacttggagttactttttgtataaagttgttactttttaaataaacatgtggtctttgtcctctagacaaataatcgtagatagttagagataaccagtgtagagaagtcccacaaacaatgtggaaggcttggatgctttgtcgtcattgttgagacagagcccatgtgagtttgttctgtgtgacagattaactcacttgggaagaatgggtctaaggtccagtcaaagtcagtttgtcatgcaagaaaaaatttcaatcttcatgattctatgttttggaaatttattcagttgtaaaacatattaattcagttatattattttaattggactatcctgttgtgattatcagttcatattttctctctccttatttgccttgacttgtaaattacgttgatctgttttgcctcttattttttaaaatccaaagatctgcaagaggcatagactctggaagtgggtgtgaggtggtcatgcttatttgtagtacgtgttatatcttagtgattcttcagattttaattggcttattcttatcatctgggcacttgtttaacaaaaattcctggaaccttttctagagcaacaggatcagaattttaaaaatctgacccagtgtctgttttaacaaatgccccaggtaattctgttgcatagccaggcaaatgaaagttttattaatctttttttccatgtatttttgtttgttttggaattgctccactgggcttttttattctccctttcaagtatataagaaaaaattagaatgatgtttgttcataaactgtctcttattgttattttatttttagcttttgatattattttatatatttttatcagattaacctggaattcctggttcttgtgaattttaacagtaaatgatacatacttgtgtttttatgttttgctactcagaaaatgtcaaggcttattatactttcatttatctgttctatccttgtctcaattaccaatttgagttactccctacccgcaagctgtccacttgattatattaaatttttttgttttcagatgtttgattttgcctgaaatgttccatagaaatatattctcacatctgtgaataagtaggtaataactagaaatagtaaatttgacttgtgaaaggtataggtttatctctatttattacacttacctctgcaaatgaacttctcatggagaaagtgattttagtgtctataagctatgttactttcactgtaaattttgttttgatgttttcttagttgagttggggaagagaaggctaggagtcaggtaatagaattgccattatccgtgaaaagatttttcagcatgttagataagggatgtaatttagaacacctgtttcttagttttagttagttttatagaaaattgattcttttaaaaatgccaattagcaaatggaatgggaaaactgattaaatagaaataatagacgaacttaaatgggtgcataaatttgcttcatactgtttatgctatggtgttaaagaaaactttcaactcagttatattttttaaaagaaaaattataattttctattgtaggaatcacatgcagcccaactacagattcttatggaattcctcaaggttgcaagaagaaataagagagaggtatattattttgtgtgttttacataatgttttatttactattgttaactgttcccattttgtaaaagcatttcaggctaaaaaatttctttaaatatttttaaaagcatttgaatttttaggaggtttccttaagatttgttattttaacttcttttctctttacaacttgacacttaaaaaatcattttgtggagatgtgctgaaaagttatcagtaagattgactgcaataacttacctaaaaactataaagaattgaaaatagatgtattaaataacagcttacccttcaccatgaggagaaaacttaggaaaatttagataataaagccttaggtaggatatagtttttttcttatggtaaaaacatatgtaggcaaaaacaagtaaaaacatagctacctatttagaacttgggaggtctaactcatggaggatagttaaaaggcaattttgtatcaacagttttatagcgagcatgttctaatttaacatttataaaatttctcagtcatttcacactatacaaaatatgggaaaattaaatagtcaaaatcctgtgctctggatagcatgctaaaataactttgaaaactttttttttttttttaaatttctaactggctggaacctggtatgtttatgttaagaattgtctaattaggatactttttactcatttaaaaatgtgtaaattgtctgttatgtgctatgttctgggctatctttattctttttgacaataaatagataagagatgttttactggatgatgaagtgttgaatagctaaatattttttatgtggtttgtgactagatttttcttattctcaactgttgctaatttagttgtgattttaatattcctactaacaaacatctgttataaatttaagatttacttgtgtctcaggttttttttttgtggtaggaaagaagaagatgtccagtcattcatttgtttaaatgtctggtggtgcaatataaatggcaatgtgcatgaaagttgcctgttacggagcttgtggtgagccgagatcgcgccactgcactccagcctgggcaacagggcgagaatctgtcccaaaaaaagaaagttgcctgatgatcttgctaaaatgcatgttcagattaagggaggctctgttggagcctggcaatctgcatttctggagagataatggagaattcctttccaacattaattcttccgtgtgatcttcatttggcctttgatgtggtggcccatggcctcccacaacaccatctgtgatattgactttgattttatagctttggcatagtgtttttatatttccgttattaaacttctggatgaatcatgccgtagaactttttcgcttgattttggtttgaatctaagctaatgtttgtgattaatttttttttcttttctcttggaccatattttcttgtagtaggtgggttaaccaagaaacatactagttccaaatacttctggatatttgtgcctctagtgtacagtgattgtactgtcattaatacattttggttttcttgattttgatatatctgtgattgactttgagtattttagttttaattacacaagaaattctgaggagctaggtaacaaattgtaaacgtttatctactactttgattaaatttcttgaatttcacaataattggaattgggtactatagtgatttgtaattataataagctttagtctagaaaatatgttttagtgcagacagattgaagtgagtggttatattttcttcttccatgtaagtctatttgcgtgtttaatcttcaaaatgaatataattgttacaggtcttaggacctgtaatatggtttatatacttgaacttattcaagtaaaatacagatttaccaggaggcaaattgcttcttttgacattcaaactttgaaaattaacttcgtgatttcatttgtaacttttaattggagttctgttgagtgtagttttagacattgatatataccaatcagagaagttaaatatgctttttggatttaatgttaagattcatttaactcatttggataatgagtattccactgtcacaactggctagtaatttagggccatttaattttcagttttattttttcctactgattctccttagaatattaagagaatggaaagtgcaaggcacataataggcatttgcattagttatctattgctgtgtgacaaattactctcaaatttgatgtcctaaaacatgaaaaatttaatatattgagtctagaattttgattcagagtagctgggtgccttggctctgggtttcttaccaagctgcaattaagttgttggccaagggagcagttatctcaaggtttgactgggataggaactttccaagctcactcatcagcttttggaaagagataacaatttttttgtcacaggggcttctccataggatagctcactacatggcagctggctgcctctcaaaaggaacaagtaagaaagcaagagaggatattgaagacagaagtcacatgttctttgtaacttcatcttggaaattatatcctaaaacttttgctgttttctgtttgttagaagcacatcattggttcattccacactcagaattgcacaagggtttgaatactaagaggcggggatctttggaggccatcttagaacttgcctattaacagcgtttgttagttatatatatttaaatgaacatgttagtcttccttcatggtcagattaaacaaaagggtgttgggttccatgtaaaagccagtcttctctgtgcaaatttgtaccagcatttgaatgattcccttctgtttcatttgatttaattttaaaatgtacttttggaaatttttgatacctattaaatttactgtaatataatcgttctgatgagtcttggtttccttttggttttacttggaattttagtgaattgaattttaaacgatttttatatgaaaaacacaaaaaagtatataaaccaaatttatagtttaaagaattacagtagagtgaccatttgtataaccaccattgtaagcacaatgcaatactgctagaacggctgaagcaccctgaccaccctttttggattgcagtcatcttccttgcccattaggtaaccaatattctgataattatggcagtcactttcttgcctttctttaatgttttgctgcctgagtatccataggtctctctgtttttgagcgttatttaagtgtgcttgtgcagtatgtaatcttttattcctatcttcttcggctgaatgttaagattcatccacatggttgtatatgactgtagttggttgatttttgttgttgtatagtattccattaagtgaatatgccccatttttgttgttggtcgtcatttgagttgttttcagtttggggctgttggcaaaaaaatactactatgttatatgtgtatccaggtttatgttagtatacatatttatatggaatgtatttagaagtggaattgatgagtcataggatatgtgtatcttcaaatttaatagataatgccaaaatattttttcaaaacaagttgtattagttattcttcctacaggcataggcattgtatgagcatttctgttgcactgtgttcttgccagtatgtgataccagtagattttttttccagtttagctaatcttggggtatatacactgttatatggttgtaatttgcattttccagatgacttatgaggttgagcacctagtactacattgattggccatttgggtttttttatgtttgtgtgtgaagtaattgtttaaaactttttacattttttgtttgatttttcttaatggtttgatatttatatattctagatatacatcttgtcagatctatctatcacaaatatctttccctctaattgggttgcattcttttcattatcttaatggtgtcatttgatgaccagaagtttctgatattaatagagtgaaatttatcttatctgttatacttagtgtgttttgtgtcacttaaagaagtcttttccacctgtggtcatgaagacatttttctatgctgttctttatttgaagctttattcttttatctttcatatttagatctatacttgaagatttatttttgtgtataatgtgaggtatagagatattttcatatggatatctagctgcccaagcatcctttattaaaaagtccattctttcttcatcactctgaagtttcacctttgtcatatatcatgtgtccatgtatgtgtgggtctgtttctaggtcctcttttctgcttcactggtctttttcgcaataccaccttgtattaaatactagagctttgaattaagttgctgttcttctttaaagtctgggatattcctggctgtctgcatttcagtataaattttagaatcagctagtacgtttccatggtaaacttactgtgctttttattgggattaatttgactagataaatctgggagactgtgtatttacagtattcagtcttctaatctgtgaatgtggtacttccctctatatttagatctttaaaatagccttaaaatttttatatttttcagggtagtcttacacatctttattttagatttagtcatttttgatactattgtaaatgatgtctgtgtctctaactttagtttcttattattgctagtgtgtagaaatacaggtgggttttacatggagatttttaaaaatatccagcaacctggttaaactctcattaatcctaatttatttgtagattcttgtatgttttctatgtacacatcataatctgcaaataataacagtttagtttcattctttatgatccttatatcttttatttatttttcttgtcttactctgctggctaggacatccggtacaatgatgaatagaagtggtgatagcggggcatcctagtcttgatgctgatctcaaagtgaaagcattcaacgtgtcaccattaggtatgatgttttctgtaggttttttgtaggtactttttatcactcaaggtagtaaatttttacccagtttgctaagagaatttttaaaaaatttctgagtggggttgagtagtctccagaatttttgtgcatctgatgcaaccatatgatttttccttttcattctgttaatgtgaataattactttggtttagcattggggagtcaatcaactttgcatctagagtgaccaaccatcctgattggcccaggggtgtcttagttatatcttagttatatcactgaaggttctgcattctaggaaaccccaccaggacaattggtccccctacttgcaccccttatataaaccaaacttggccgttatgtatattctcttctatatggtttggtttgcttatattttgtttaggatttttgcatctatgttcatgagtgagattgttttttttcttacacatatcttgtccagttttgctataaagattatgctagctttatcaaatgtgttgggaaatgtatcctctttttaaattttctggaataattttgtgtagtctaagaacatcttttttgaatgtttaaagatcttactggagaagcagtctagacctgtgattgtttgcgggaagttttaagttattgaatctgttacttgaacagttacattcttattaaggtttttgttttagatgtcacttttcatttgttaaattttttctagtcattgtttatgtcatctcaattttcaaatttattggcgtaagattggtcttaatagagtcttaagtttttaatgtcaccagggttcattcctggcagtgtttattttgcttgttcctctctctctctctctctttctctcgctctctctctctctcgcttgttctgttggatcaattcttgccaggaatatatcaattatatgggtttttttctaataactaacttttgactttgtttttcctctctgttttgtttgttttctgttttatttatgttctttattatttccatcctgctttctttggttttacttttttgttccttcctaatctgttggcttgggtggatatgcatattattatgcagattattttttctaatgtaggcatttagggccatagtttcttattttttaatctgtacctaattcttttggcatcatattttgtttattattgttcaaaataatttctaattttcattatatttttttcttaggcctgtggcttatttagaaacaaatgtcttattacttgaacattgagattttgttttttttttgttctggatttctgttataattgcattgtagtcagaaagttgtgttttctttctttgaatataatatttgctgtaccaactggtaattggttaaattttgaaatacttgtgcttgaaaagaatgcattttctgcagttgcatgattcattgtaaagttgttaaatgtgtggtgagaatttcctgcattcataccaggtcttcctttccttgttatacctattactgtctcattatcttttaggtgaatttcttatagatagcatatggttggactatgctttgtaaatctactctgccagactcagttttttaattgtgtatttaggccatttatttaatataaatattatagcataagcctgtcattttattttttgttttatatttctttttttattattgttgcttttctgtttttctttccatgggtttttgaacagtttcttttcggaattccattttgatttatctataatgttttaaagtaaattttttgtatcattttttagtggttgctctctctgttacatcatgtatttgtaacttatcagcctactggtattgacatctgtttacatttgctcttaaataagccatcttattttgtcccctcactactctatcatttatttatttggttttgttcttgctttttctgttttcttctcagcttaaaacaaaatgttggctgggcacagtggctcatgcctgtaattctaacacgttggcgaaggtaggaggatcatttgagggccaggagttcaagaccagcctggacaatatagtgagactttgtctctacaaacaattaaaaaaaaattcgtggagcataggggcgtgtgcctgtagtccccgctacttgggaggctgaggtgagagaattgcttgagcctaggaggcagaggctgcagtgaactgagattgtgccactgcactccagcctgggtgacaaaatgagtccctgtcttaaaaaaaaaaaaagaaaagaaaaagtgctatgaaagggttaaatgaagtcttttaatcaggtctgccatttcaggaactagatatgaagtatgtgagtgtttgtggagtgatagtatgggatgacaagggttttggcttgctgtagtgtgcacttcatatggctaaatgctttgtttttgatagtaactctcttagaattagcatatattaagttttgctgctgtatgtatgtatgtatgtattttttgagatggagtcttgctctgttgcccaggctggagtgcagtggcactatctcgcctcactgcaacctgcacctcccgggttcaagagattctcctgcctcaccctcccaagtagctggtattacaggtgcctaccaccacgcctggctaatttttatatttttagtagagacagggtgtcaccttattggccaaactggtcttgaactctgaccttaggtgatctgcccgcctcagcctcccaaagtgttgggcttacaggcgtgagccaccgcacctagccttgctcgatttttaaaatcagcttttccccattgaaagtgtaatggtgtattcttttgttcagtttggaacaattatatgtaatgtattcaaaattatattaaaaattcaaataatgagtttaatgcttaagcatatctttatcaaggcactaatgaaagtcagttgagtaccaatgatacctacctgcaccaaatccattatcagtaatgggagagtctatctattatcttcgtaagggattctgagacttacttactctttacctttacgttaaatgtttctaaaagttttctttgggctttggcacagtgttaagagagtgcttgctattgattctttagtcccatgccctcaaatagcattgtcttagttctccatcttatatatttatttatttttctaagtggcaccaaactctgtaatggtgttaagataaatgtgatctaggagtttattatcattcctaatttgtgattgattttcctttagataatagcagttcagcttcttgaacttttcttcatatatctttaaaacattcttggacttatattcagacttttcttctaagttctccttcccggggttatgtttacagagtgaatttagcccatttcttctttccacatccttgaagtggttgtccttcatcatttttctatttactagtactaaaatgtcttgcactgatgcccttataatttacagctccaaatcccttcagaattctcatcttaaaatggaaacacctcaaatttaatatgtgctctctcaacagttttcagtcttccaaacttttttctttttaatatttcttgcctgataccttgtcagactttcttacggataggttatatcattttgttttgcattctgtctgtatatctgtcaggacaacaccatgccttcattatttgatttttaagttgaaccatatgaaattgctgtttttgaagtaaaaattgttttattattggcagttttatgaggttcaccttatgtatagaagccttcatatgtaacaataggtatatgatccagtaaaagctttgaggtattaggagatggaacattattttcagagaagacattagagtttaatattttgagatttcaggtgacattggaaatttttctggaatttcaagttcaaaagcagaataaaaattaatttgatttcaattattatgtatcatacaagtaatattggctgtctttggctattgatattacagatatttactttctttttaaatataatttcaacttttcgattcagggagtacatgtacgggtttcttacgtagatatatggtgtgatgctaaaatttggggtatgattgaccccgtcactcagaagtgtgagcatagtactcagcagttagttcttcaaccctttcttccttcccccaccccagtagttccctgtgtctgttgtaaccatctttatgagtacccagtgtttaactcccacttataagtgagaacatgtggtatttggttttctcttacttcattaattcacttaggatgatggcttccagctccatccatgttgctgcaaaggacatgatttgttctttttatggctgtacagtattccacggtgtctctgtatcacatctttattgagtccaccgttgatgggcaatgatgggcattgatgaatctttgctgtgatgaatagagctatgatgaacatacaaatacacttgtctttgggggagaatgatttattttcttttggatatatactcaataatggaattactcggtcaaatagtagttctcttttaataagctctttgagaaatctcccaactccggtctccacagtggctgaactaatttacattcccaccagcagtgtacaaacattcctttttctctgcagcctcaccagcatctcttttttttttttttttttttgtttttttgtttttgttttttcacttttcaataattgccattctgactggtgtgagatggtatctcattttggtttttgttaacatttatctgatgattagtgatgttgagcatttttttatgtgtgatggccacttgtatgttgccttttgggaattgtctgtttatgtctgtgcccattttttaatggggttatttgttttttgtttttcatttatttacgttccttgtagattctggatattagacttttgtcagatactcattcttctttttaaatgtattttttaaagcaattattctaaagacctcttatatatagtaaagcatttgtttaaataaaaatttcaagagtggaacattttaaggtagttaaatgaaaatgtttaagagattaccatgggagtgttttgctgaattagaggtcagcatcactggatgctggagttgaaaatgtccatgaacccaaaggcctcagtgatggtggagaataactgggatgtttattgatggctcaagtgggtggacagggatttggctgcttggtatgagctagacagagtggtttttatgttatggtggaaaactaattttagggtggaagactaattgttggaaatggccatggaatggagtagaaatagtgagttcctatctattaataagtcctgtaaactctggggctttagagactttatcaattgagcagtatcaattgagcagctgttatttgaaagagtttcaggacagacagtgtctttaagagtgagcagggtttcagttaaggtggcattgtgtgacatattttaaggcggcaggaagtttattaaagtagatagatgagttgaaagcttttgaaaatgctaatcactcttttaacccttgatttctccaatggtactgtcatttcccctggttttctggctgcgactttgcccttcttgattgttaatgctgcttcttcctttgcccatctctttaacattggtgttttctaccatttcagttttgcttttatctcttctgactatacttattgatgttaagcagttttatttattgccttactttcagatttattatttacctttctcatggcttttgtaccttcgcatatgttattatttactctgcttattctgtcatgcctcactgttttccacttggcagaattctgttagtcttttaaggctcagcctctgatttaattttcaatcaaattttagttatctagtcctcttcttaccccaccagctctacattagatgtggtctatattcccttaatacgttgtataccatcatcataatgcttgctatgatatttcaactattggctttcttatttgccatctcccctagactgaactcagggtaagggctacagttgtttttcgatcctgttcttctcagtacttaggaaggtgcctagaattggtaaatacttgaatgagtaagttattaattatattaccaactttgcctgtattgccacagaagatactaatactaataagtctataaaaaaccctgtttgcccttatcagttattaaagaaatgagttaataataaggtactgttttcaataggtagtaaagaatagtagttaaaagcatgaattctggaacaataagcctaccttaatttgaattccagttctgccacttacagaatgattttggacaaatcatttaacctttctgtgcttcattttcacatctggcaatcagtaatatataagtattagttgttaatattttacatttataaatgtgttcaatatttccaggttagagtaagacaaccgcatcctggcgttaggaatttaaattggtatagtgtttctggaaagcagttttcttttgattgaataattttatttttaatactctcaataaaatctgaagtaatcttttaataaaatctgaaaatgaaatgaaatctgaaagaacaatatgttccagaattatatatgatagtttgcaggcaacttaaatctctaatgagaaagggaatggttcaatatattaagtgttattcaacagttacaatgtttgcattttagtggcatggaaaattattagtggtttaataggcgagatataaaagataaaatactaactcaaatatgtttttaaaacccttaagaaggaagtgttaagatactgacttgtggttgcttttgggtgaggggatttaacctctgtcagactaatctttgtttataaagtatgattaaagttctggtgcagtggctcacgcctgtaataccagcactttgggaggctgaggcgggcagattgcttgagctcaaaagttggagaccagcctgggcaacatagtgaaacctatctctatttaaaaaaaaaaagtgtgattaacaactgacatgctgaatttttctgtttaacaactaaatgaggtaatgtgaaagttctttggctatcttgtatttttttaagccactgtcattcatctcatacttttattgtaaaatcaaactgttgtattaaagaagtacaacattgtgttttcacataattctctacctttgcattaaaaaatgggaacttctagctatattttgttgatggttatccctcctgttaatttgccattagtgccaagtttgatagaaattattttcctaatgtaaatttattttatgatcatggtgatgccattttggtttggcttaggcttttttttttttgtctttctctctctatttaatctgcagcaactggaacagatccagaaggagctaagtgttttggaagaggatattaagagagtggaagtaaggaatcaagaatttctcacatccttagcaatttttcaatttcatgaaattgtcacctttccattaagttgctgtgttaagtttatgggattggtcttaggaagaaagtaacagctgttactttcatttcaattgaggatgaatttttgtagaaaaaaacattctgaacacttgataaaatatagtctaaatttgttttacaatgttttattgccataatttttctcgattagactgacaaaaaaaatcgctcagttttcttggagtgccatcataacttaaaactgtcaattattaccactacaatgctttttttattaataacttttacatacctactctgtgcatttctaggagttaaggttaattaaaagagaaatataagaatacattaccaatattctgggaatttacagtttaatatagtttacctaaggaaatttatgggaggatccttgggagtcttatagggtattatgatttgaagtttttgcctttggctgtatttattaatttagtttgtgtttttagttatttatatgtattgtaatttttttttgctgatacatagaacatgtttaagattaatggatttaatatttagtggatgttcagtatcctctgtagcattcttaagttgttacacatttatgtcacttacctgactgtatgattgagctgaggttgcattagctagaaataattttacctgattatgcatctttagtggcattttaaaatttgctattttttcattaatcaaagttagtacataaaaaaggaagctaggttgtcagtgtgagagagaaaatttatataatggttgattaggcctattcctctggattactgatcaaaaattagagtctaagtcattattaaacaaagctgatatttcaatcttaatatttgtgaagaatatatataaagcagagactgacatattctgggtgttttttgtgtttttatgttcaagagttgaacctgatgatccagttatcttactgtcatatttatcttaacatttatcaatagattatcacctgaattaatgatatgctagttcactattcacatagtataatgtacatgtcatttaaaatatttacatttacatttatctttttttgcatgtggtggcttcattaatgatgaacaatatttagtaaacaatttatagttctttaagattgtgtaccatggaaaaggcttgtctcttaacttttcacatgtccttgcttttgtattctgtggagaggaagccttcagaaatttgatattgagacaaacagggactgatgaaaacctgggaatagaaaggaatatatcatgcctctttttgatttatatatcttctatttgaaatatctactataattcaaataattttattttcaggaaatgagtggcttatactctcctgtcagtgaggatagcacagtgcctcaatttgaagctccttctccatcacacaggtacaagcttcacacttgcaattgattagaattcatattacaaagtatgcatatggtctagtcctttaggagccttttccatgcagtgtatgaaacccctgagaaattactttggtcatgatctagaaatgatattcatatggcccatctgtttccttaatgcgttggatttcatgccaggaagagttagcgagtagaatactataatgttatgaattcacagttggattaaaagtttgatgaatttcttaaagtaatgatagctttaaatatcttgtgaattaaagtcagatgacattcaaaaatctaaatttgagaacatgaagtggtaatattagggaaaaatgtgataaaataaaaccttggacttctccccctaacttgttaaattttattggacagatcacttttcccacatttaaaatgagggcagtagacagatctgttagtttagatttccttggtattttcttataactacttattattaattcttctatatgcgatattagtatagggttatatttgtcatgaccatttcccaagattttagaataaagcctggtttcatttagtagtaggtatttgtaaagcatggtgaatgtgtgtgtttcccttttagctgtaaaacctacttcatgaaatatatgctatctgaatcttgagttttgaatttttatgcttgaaatgttcaaactaagaacagttttacatgaaatcatttgtttttgatttgttaaatccactctctgtttaggataacgatttaatggaatcttatcagacaaatagttttaggtaatgtgtactatcaggaagtccagttctactatggtagattataataaccttcggaaaccttatcactttaggaaagctattatggatctagttcagtacatcatgtacagaaagggtgcagggatgttctagttaaggagaattcagaggtttgacatttttcccattaattatagtatggagaatccttgtgagttcgttaattctggtgttattttagctgtgtaattcagccgattttcttctatattttactttctttgaaacatttgagaatgacttggtctgtgtatattgttatctttaagccttgaattcagttctgatatgcacaggatctttgtcaatggaatacttattatgtaagtacatacagggaagaaaaagttgtcacatcacaaaaagttcactaataatgattcattcccattgtctttttcctctctgtttaacagtagcaaattttttttgtatatattgtttccagatctttgttactcagtctctcactgattgttggattttatgaaattgtgacagtacggtgcatttacttaattgctctatttattgaatgcctctgatgtgctagggactattctaggtgttggatctagctgacaaagtcctcgtccctttggagcttacattttgggatgtgtgtatggaggttgggggagacactaaaagggccaatgtatagcatagtagtagtatataacatacaatacagtcatgcactgcataatgacgtttcagtcagtgatggactgcatatatgatggtgatctcataagaaaataatagagcacataaagagacctaatatatgacacttgatattggcattgcagatcaagtaggggaaatgactgatattcagtaatggtgctgggacattggtttttcacatatatatgtgtacatacgtatatatatacgtacgtatatacgtatgtgtgtacctacgtacatatacgtacgtatatacgtatgtgtgtacatacgtacatatacgtacgtatatacgtatgtgtgtacatacgtatatatatgtacgtatatacgtatgtgtatgggtatatatagtatatatacgtacatatgtgtatatgtgtgtatatatagtatatatacgtacatatgtgtatatgtgtgtatatatagtatatatacgtacatatgtgtatatgtgtgtatatatagtatatatacgtacatatgtgtatatgtgtgtatatatagtatatatacgtacatatgtgtatatgtgtgtatatatagtatatatacgtacatatgtgtatatgtgtgtatatatagtatatatacgtacatatgtgtatatgtgtgtatatatagtatatatacgtacatatgtgtatatgtgtgtatatataatatatacgtacatatgtgtatatgtgtgtatatatagtatatatacgtacatatgtgtatatgtgtgtatatatagtatatatacgtacatatgtgtatatgtgtgtatatatagtatatatacgtacatatgtgtatatgtgtgtatatatagtatatatacgtacatatgtgtatatgtgtgtatatatagtatatatacgtacatatgtgtatatgtgtgtatatatagtatatatacgtacatatgtgtatatgtgtgtatatattcatatatgtgtgtgtgtatatacacacacacatacatacccccatcttggtttgtgtaagtatactctatgatcacataatgacaaaattgcctaatgacacatttctcagactgtatccctgtcattgagtgatgcatgactgcactaccttaggaagaatagttaggcatggtagggctttgcaagaggattctgttttagttttcatagccaggcttctccaaggaggtgacatttaagttgacacattaatcaagtaaagactaattatgatggaaagttatgggatagtgttgagcaggatctgatttagattttaaaatgtttacttggatccctgtgtggaggacagagaagatgtgtccctctcaaccccttgacattggaagctggggagaaaagttaggaagcattgtagcagttcagaagagaggagatgttggtttgcattaggattttattgatagaagaggtaagagtggttgtattgtaaaataaagtagcagatctcgtaaaacatactagatttcatgaagtttatgaaaatattgttggagaattgctaaaattgcttgcaaagctgtcattaaattagattctagcagagttaaatgggttagcagttcaagaagggaaaataggcaaacagtattttcttcaagagtgttttgatattttctctgaacaagtgatgtgaatatcactcaaggattgagagaggcacttgggaaaaatgatgtagcccttaaatactcttgagtgaaaatgatccttaagattacgatttgaaatcagacattctgagacaaatattatcttttataatactattcatatttgatttttctttaagcaatagtatgtagttgcaattttactaatcttttttctttcagaattattagctttattatttaaatgccagacagtttttgttcttattcctcactaaaaagttttgatctctcttttaagcaggcttactttacaaaagctcttttctagatttgttagttttctataatgaatatctttattatatgtcaggtcactgaatcctttacatagattctgggtttatgtttagattatgtatttaaatgaaaaagaaaagcagaagccagataatggtattctctccctttcccagccccccacagaactttatattctacctactttgattagctgtaattgtcatatcctattttactgcttctgccttgtttagatccttagcatcacctcatctagcaataatcttttaacctatccttttatgtgttattgccagaaatatgatgtttctttcctgcttaaaatttttcagtagctgcctatcatgtacattggtttagatccatctctttgcataaccctccgtaattgcctagccccagcctattgtttttgtgctttaaaattgtatgtaactctcaaagcagaatgttagggtatctttgcttacactgttccttttgcctagaaacttctcctggattcagctgttaagtaactatccccaaagaccccaaacctatagggtcctagggtgaagtctttctattcttttttcagatgccatttccctaaaaaattaggggcagggaaaaggaagcaggagatagaattaaccacttgttttgttttgtaaagatttctacttattttgattctgtttctataatatgtattactttggaaaaaatacatgttttccatgctgtactgtaatcctgtgagtattgtttttttcttatacttccacatttttatgtatttatatataataaggacttaaatacaaggttttgagtaaatatttacctaacctagaatgtcatttaattttcacagtttgtgaatttgttaaagcatcacatgtagtatacttaataggttaattattttaatcttgctataaaagctatcagccatgcttcattgaggtgaggtatgttttttaaaaaaatatatcagttgaattttttaaccttttaagctttcatccatttcagactttccgtagaattaatcaaaccaatgactgctatacttagaacctttttaatctgttttaaattctaaggaagaaagtcttcacaattctcagtataaaccatagtttacattttattgttgcatagttgtgtgtgtgaaataatgagaaaattagagattggtaggcaagcatagtctcttttacttattatcaagaggaattggttcttttgtatgggagggtgattatgaggatatacatcctatctgcccttctagagtattattaatattttagacattttttaactttttagctcagactttatttaaataataaagcaaaacatttttgttaggttctcttcctggcaaataggacaatgctgatttttttttatattgaaacatacttagaccaggtttgattatctctgaatttttgagagcggtaaactgggtggacgttatatggattaacaaatgtggattttaggctctttaaatattatttagtttattattatgtgtaattgaataggaagcagagctaaataacttattattaagcctatgaagccattagcttagtatgagcctagtcttatctttttgtggttagctgtaaatctggtgtgatgaggaacgttagcatactattcgttagattttaaattctcgtcaaagccattgcagtaactttgcttttaaatttctgaatgtatcttattgatgtgatttctgtcttagaaatagttatctcataattgctttattctttgtctttaaggaattttggaatggtgagttattagtctcttctgtgtgttcagaacatcggataacttagtttgaaaaatgatgtattagttgaagcttctctatctccttcagctgggtatgctttataagatccagatagttgctggagttaaatttgcctaataagtcttgtttttctaaggtagtaaataaatgtagtacaaaatacaagtactaaataaaattttttgatctacaatctctcatctttaaaatgcttttactgataagagattgctgttgattgaaagtttaattcattttttttaaaaaattgtcatgcagacatgcattagtttgaatcctgaattgcctattttctgtgctagaggaaggaggagatttatgaataaaatatataggtaagacttttatatgacacttttgattttatttactctatcagacatttttgagacataccttttatttgtatttctgtaattttgacaaagttccagacgaatcaaagtgtagggacaataggaaaaaacaaggaatcattttatggaggctaagagtatttaacattaaaaatatatatgtaggatagtgatctaataccttgtgaatttgtatattttataatttgaataaattaatgatatttaagaaacaatactgcataatagcttctggactatattaagaaattcctctagtttacccatgtcattctatgcaactatactaatctctggtcattgaaagaatatatgcttgggagggatatggaggacagggatgactctttatatagtagatgaaaagtgagccatcttgcctatttttgcatagtgagtctttggctggattattacctatgaccaatgcattgtcaatgtctgctgcttcatgttaatgcttaagttcttagtactttttggcagttattattggttcaacaactttattttatttggaaattttttttaatgcaggaaatgaaatgtttttataatcaaattgaactaatgcttatttaaggggaagattatgacaatacaggaaattatctgtatacaatttaatactttttctcaaaccttgaaggttaggtgattacagacagattttaagaagtctcaagtacacttaaattggagagttttgaacatacatggtgttttgctgtattttaatgaagcttacctttatgtgggagtagtaaaaccatttgattgttttattcttgtgagtactaaaggttactttccttaattctgaccctaaaccatgccaaggagttgaacttgatgccaaagtcagtaaaataattgaagaatcttaaggaatcttgattgtgaactaaaacaaaaacaaacacaaaacacaggaagcaaacttccatggcaataatataggggatactcttcatacacctgtaatttctcattaaaattgataggtaatagaaattcagtaagttctgaaaacctttcttgaaactctgattttctttagaatatttgaagaatttattttcagtcattcagccagtatttgagccagcgtgtataaaacactgtgttagaacccaattattgagagaaaatatttgtaaatcatatattggattaggtgctaatgtgcaaaatatacaaggaacaaaatatacaaatactcaatgaaacacccctatttttaaaatgagtaaaggacttgaacaggtatttctcaaaagaagacatagaaaagaagacatagatatagaaaaagaggctcaacatctctaatcatcagagaaatgcaaattaatgcacatcacctcacatttcttagattggccattatcagaaagatgaaacaagtgttgatgaggatgtggagaaaagggagctcttataaactgttggtggtattgtaaatagtacagctacattggaagacattatggaggttcctcaaaaaactaaaaatagaactaccatacgatcctgcaatcccattactgggaatattctcaaaggaaataaaatcactatgaaaaaagtcccatcttctttgtcccattattcacagtagccatgcaaacaacctaagtatttatctaaatggatgaatgaatttaaaacatatattgtatgtatatatatatacacacacacacatatatacacatacacacacacacacacacacacacacacagtagaatactattccaccttaaaaagacccaggaagttctgtcatttgcaccaacacagatgaacctagatgacattatgttaagtgaaataagacaggcacagaaagacagatattgtatgatcttgcttacatgcggaatctaaaaaagttgaactcatacaagtagagcatagtatggtggttaacagagattagaggtggatggggagaggggagaagttggtcagtgagtacaaagttatagttagacaggaagaatcaattctggtgttctgttgtgcaacaaggtggttataattaataataataaattgtatgttttagaatagcaaaagagaggattttaaatgttctcagaagaaatatttgaggtggtggatatgctatactctgatcatttcacaatgtatgcaaggatcaaaatattttatacctcgtaaatattcacaattattatgtcaattaaagataaaaatttaaaaaacactgttaggcgctgggatatatttgtgaatatgacagaccctagaaccctgttctcatggttatatattcttaggaggaaaaataagatatgtgagtgaattgattattctctttaaattttggtgtaaatagactttttgattccaataatttaaaattataaaactgttccaaaaactgtagtaattatgattaattagtaggcatttcaggatttctataaaatatccttgggttcttgataagaactaaaatcatcaacagaatgaaagataaaaatcatatcatcatttcagttgatacttaaaaagtgatgttgatggccaggtgcagtggctcatgcctgtaaccccagcactttgggaggccgaggctggcggatcacaaggtcaagagattgagatcatcctggccaacatggtgaaacctcgtctgtactaaaaatacagaaggctgggcatggtggcgcgtacctgcattcccagctactcgggaggctgagacaggagaatcacttgaacccgggaggcagaggttgcagtgagctgagattgcgccaccgcactccagcctggtgacagagcgagactccatctcaaaaaaaaagaaaagaaaaaagaagtgaggttgatgaagttcaatgttccttcatgataaaaaccttcaatgaactggttatagaaggaacacacttcaacataataaaagccatatatgacaaacctacagttagtcatactaaatggtgaaaaagtgaaacctttcctcttagatctggaactcaacaaggatgcccactttcaccaatgttactcaacgtagtactaaaagtcctagctagagcagtcagacaagagaaagaaataaagagcatccagattggaaaggaagaagtcaaattatccctgtttacagatgatgtgatcttatatttggaaaaacctatagactccaccaaaaaactattagaacgaaatgatacagattcagtgaagttgcaggatacaaagtcaacatacaaaaaatcagtagcatgtttatatgccagcagtgaacgatgtgaaaaagaataaaaatatattcttatttataaagccacaaataaaattaaatacttaggaattaaccaaagaagtgaaagatatctataatgaaaactataaagcactgatgaaagaaattgaagaagacacaaaaaactggaaaggtatgccatgttaatgattggaagaatcaatattgttaaaatgtccatactacccaagcaatctacagatacattgcaatcactatcaaaacaccaatgacattcttcacagaaatagaaaaaaaaatcctaaaatttatatggaatcacgaaagacccagaagagccaaagctgtcctgagcaaaaagaacaaaagtagaggaatcgttattacctgattttacattatactatatagctatagtaaccaaaacagcatggtactggcataaaaacagacacatgccaatggaaccgaatagaggaccccgaaacaaatccacacacctacagtgaactcgtttttgacaaagttgctaagaacataaattggggaaaagatattctcttaaataaatggtgcttggaaaactggatatttatgttctgaagaatgaaacttgattcctgctgcaaagatcacatcaaagtggattaaagacttaaaggcctcaaactgtgaaactactacaagaaaacattggggaaacttggggcaaaaaatttttgagtaataccccacaatcacaggcaaccaaagcaaaaatgaacaaaaggtaccatatcaagttaaaaagcttctgcacaccaaaggaaacaatcagcaaagtgaagagacaacccacagaattggagaaaatatttgcagactactcatctgacaagggattaataaccagaatatacgaggagcttagaaaattctataggaaaaaaaaaatcgaataatcatttaaaaatgggtaaaagattagacatttctcaagacaaacatggcaaaccagtgtatatggaagtgttcaacatcattgatcatcagaaatgcaaatcacaactacaatgaaatatcatctcacctcagttaaaatgacttttatccaaaagtttggcagtaacaaatgctagtgaagatgtggagaaaagggaacccttgtatggtgctggtgggaatgtaatttagtacaaccactatggagaatggtttggaggttcctcaagaaattaaaaataatagcatattacgcagcaatcccactgctgggtatatatccaaaagaaaggaaacgtatacatgaaagagttatctgcattcccatgtttgttgcagcactgttcacaatagccaagatttggaagtaacctgtgtgtccatcaacagatgaatgaattgagaaaatgtggtacacatactcaatggagtactatcagccataaaatgaataagattctgttatttgcaacaacatggatagaactggaggttattatgttaagtgaaataagctaggaacagaaagataaacaacacatgttttcacttatttgtgggatctaaaaatcaattgaactcgtgaagatagagaatagaaagatggttaccagaagctgggaaaggggtagtacggggctggggggcaggggaggtgggaacgtttaatggataaaaaaaaaaaattaattaaaatgaataagatctagtatttgatagcataacagggtgactatagtcaataataatttaattgtacatttaaaaataacttaaaaagtataattgggttgtttgtaacacaaaggataaatgcttgaggggatggatacccacattctccatgttgtgatattacatattgcatgcctgtaccaaaatatctcttgtacctcataagtatatacacctgctgtatacccagaaacactaaaaatttaaaaaaattaaaaagatctaaaatcactgcttgatgatgatgataaaagttcatttaaattctgaaatctgaggtgtgaagaagccaaactgcagtgttcatgagtgtcaaccaagactcgtatttgaaatgcagatttttaaaatctgattgattaggtttgaggtagatcttagagattcaaatgcaggcctggggtttgggagtggtagagatgctactttagaaaatatgggaagattaagtaattggtgataagtctgtgttactgacatgtttttgaataaattcttaaatctgacatgcttattttcctttttataagagaaagttcaaatattcaacacaaacattttataactgcatatttcatgttttgtgcagggtgggggtaaagatttttaattcttttactctactctgtaaagttacacattcttctgtaatgtctttgaaatacctcagataaagtttctgggcttgagagggccggaaaagttaaaaatcaagtctctgtaaaggaaacaaattattggtatataccagccattccctgttaattccatttatatgctgtgattagagccttatgtttatggctttttgtcctttcaggttagagtcatttagagtcacataggaaactcttttcccctttaattattatagatatactttgattctaggaggtcagaaatgggggtacctagggaaaccaaagctgcacatggtaaaacttgcttaggtataaggacaactgtatacaaatgtaaaatttcatgtgctgttatcatttaccatttctgctgttcatgacatctctcctaccgaagtcccatcatatttttcccattcaccacatccctgaacctttgaatttttaattaattgtttttggaatgcttcttctaagtatttctggagtacttctgaggttatttcagataattgtttttttaaaccctgatggattgtatcaactatatcatctgataatttaaaatttctactgtgtgaattacaaataaattgtaatctactccaacttgttggaaagtagtagtagaatacaaactagtcaaataaaccacgttgtgtaatgaactgaaactttaacttattttgttggagtcaaatcagtcttgttggtcttattcctttgagcttatttttgtctatttttgacattctaccaaccgaagtagtttacttccaaaagtgataaagcaatagactcagacctgttccatcttttagaaattttccctcatgcttgctttttatatctgctagcagtaagtttctaaggaaactcctcttacaaaaaaaactttcaaatgagctgctcttttgctttcctttttcagtttcagaattattatgtaataaacattttaaaaggcggtataagtattaggttccatagtccctgtatgcattatgtaactgttactttttgtaaccatgtactaattaaaagaagacaagaggtgctggggaagtttttttctggagttctgaaacactgtgatagcgtctgttgtttgaagaataaattacccctatgtctttcctgtagaaatcatagataagtactctgtggcctagtacttctgttattgaactaaccttgcattccttaagtaaacctaaatttgtatgatatataagtttccaaaatttttttggaaatcttttgggtcagagtatagtcatattcctttcctgccttcaccgattttggaaaggtaacagagtacatatgccatgtatcgtataaaactgatggaagaataagagggactttcccatcaagcacattaatatttcagcgttaaaacatgatgtcagatgtgttcagaccaggttttttatttttacctttaaataggttgcaaaacagcatttgattttcagagttttgaattttaggtcttaaatcatctttttgagcccagattttttttttttttttttgagatgcagtcttgctctgtcgcccaagctggagtgcagtggcgcgatctcggcttacttcaagccccacctcccaggttcacaccattctcctgcctcagcctcctgagtagctgggactacaggcgcccgccaccatgcccggctaattttttgtatttttagtagagacggggtttcactgtgttagccaggatggtctccatctcctgacctcatgatctgcctgccttggcctcctaaagtgctgggattacaggcgtgaccaaacttttttttttaaggccacactatattgccaaaaatctacatattgctaaaaagccattgtcatcactgacatttatttatacaaaatttgtgtccttgaaattcagataccatgagaagagtttagtattgtctgtttctaaacaggcaatgagagaagatttcattttaattttcagttggattttgcatcaaaatcaggaaatctattttagaaatactgtcctagaggagaactgcatttatatgtccaagttgcaactgtcaaagtagtattccagctgtggaattgtgtcactgcactccagcctgggtgacagagtgagatcgtacctctaaaaacataaaaataaaaaacgacatttaaagaaatgaaaataatgtctggtacttagtaagaactcaataaatgttagctgctgctgttattgttgttgacagattagtcgcatagattttgggtgatatatttgactacttgtgtcaaatgttaaagggtatgtggaataaaacaagaaaaaacatgaagaatgatttctaatatctctggaggtctctgcaaaattggggccacaacaattttggttgctcaataaatgggatttactattaatttaaaattaaatattaaaaatattaaattattaaaaatttagtattttcaggttacttcttgcttagtgtgttttcttttggagaaactggttcagtaactatatgtagagtactggaaaggaaaaagttttatttgtagccccacttggtttatttattaaatgtagaagtttatttttctctcttttacgtttatagcaaaaaaaatcaatgataatagtctaattttatgtgagtacatggcattttggactctctttgattctcttattcataattccatatttattgtctatgtttagcctaaaatgatctcagtgtgctttatttttgctcatcgattaaaaatttctctttataatttaattagctaatgtatccactaataatttaaatttaaaccattctttttcaatataaaaggctagtctaaaatcaatatgcctattatctttccaagagtgaaccattgttttctcttggctacctcttcattatggtatacctcatatgtgaaattgacttaataatcttctttctagttaggaaatacgtctttgcttttgaaggaaaataatctaggtgaaaatagttatacggacatctacttgcatagcagaatttctttgatacctcaaattaacagctgcattgttgttactttttttagcaaagcttctcactgttaccagcaagaacattaagaactgtttcattatcttttgattaaagtgtattactcctgtatcagttttagttactaccctgaaatttttttcccttgacgttttttgatgtctttattaagctttttttttttattttttggagatagagtcttgccctgtcacccagcacccaggctggagtgcagtggtgtgatctcggctcactgcaacctccgcctcctgggttcaagagattctcctgcctcagcctccctagtatctgggattacacgcacttgccatgatgcccagctcatttttgtatttttgtagagttggggtttcaccatgttggccaggctggtcttgaactcctgacctcaggtgatccgcctgccacaatttcttaagctagtataacttttataattttattgacatttatttgaaaaatatatgattctgtcttatatttataggttactgtttttcatttttctctttaaaatatgtctacaaagtggaggctaatccaggattttccagttcttaagttagagaacataaggtgcctaggtagtttatatagcgtggtcgttcttgtggactctgggacttgactgcttgggtttgaataataactctgctatttcccagtgttgttatcttgggccacatatataatctctcagtgcctgaattttctcacttgagaaatgagaatgataatagtattatctacattagagctgtgaagtttaaattatttaggttagtgcatagtaaaccgtcagtaaatggtactattgatattgttactgccatctagtgactgtggatgagtcaggagttaagtagtagtatagcaccagagtcaagagggacccagccctgtcagtgctttctaatattcttttctatatgtgtgtgtgtgtgtgtgtgtgtatgaatgtataatgtatatattaagcagaattaatgggttttattattcaaatttttctattgtagcctgcattatacctttttcttagtgaataaaattaagacctggtagaaaataagtttcatattgtgtaatcattaataagatactatttttaattcttagttttatcttcaacaaactgatgagtattttttaacatatatttgaaatgtagaattatatcactgtatacactgagatatcaatatcattcattttttaggcttacagtcacagaattctgaatcataaatccataaaaatgcatagctggaaatgttctgttctataggcctctaaatatgcaactacacaattttattagtgttatacaaacactaagggattgagtttcattagtaggaagaacagagatttttaatgcattgcattgcctcactttcagtcctcttagtctctggatggagtaaactgaaaatagcatgcaatcttgtcataccagtgtgtaactctataggaaaggcaagtaatggttacattttatcagaataaactcatgacaagaacatttgaattctttatatggttaagttcttcaaaggctcttttataattgagttttgctataggaattgttaagaaacaaggtttttgttttttgtgtgctgcattttttggcactcatctaactttatttctttattttttcattgatacgtaatattttgtacatgtttatgagggtacttgtgatattttttacatgcatagaatgtgtaatgatcaagtcagagtatttgggggttatcccatcaccttgagcatttatcatttcttctggctattttgtttttgtttttgtttttttgtttgtttgtttgtttgtttgagacagggcctctctcttgcccaggctggaatgcagcgatgcatagctcattgcagccttgaccatttgagattaagtgatcttcctacctcaccctcctgagtagctggaaccccaggcgtccaccaccacacacagctaattatatgtagaaaacggagtcttactattttgtccgggctggtcttaaactcctaggctccagtgaccctcccaccttggcctcccaaagtgctaggattataagcatgagccaccatgcctggcctcttctagctattttgaaatataaatacattgttgttaactatagtcactgtaatcttctgtcaaaccttagaacttctttctttcgtgtaattttatgtttgtacccattaactatgccttaaaaaaaaaagactgctgtgtagacagattcatatgatttatttttgaaaatgtgaagttttatgttaactaattttgttaataaaagaaactaaagtttattgaatgtttaccatattttggcatcatactgtgaacttcacatgcattatcttatttaaatctcatacttctctgatgtgtcttcatcatttaatagatggagaagctagagctcaaataagattaatcacttgcccagagtcaggttattcacttctatgggtaaaattcaaactgtgtactacttagagtacctcccatgctttaacctttgaggttctttcagtactaagtaattaatcattttgtatgtttacatatagaaccattctaattagtaatctcaattgcttaaattttatagggtagaaagaatataaacttttttgttggttttttgtttgtttgtttgtttgtttttcgagacagagtcttgctctgttgcccaggctggagtgcaatggtgtgatctcagctcactgcaacctccgtctcacaagttcaagtgattctcctgcctcagcctcccaagtagctaggattacaggagcttgccatcacacccagctaatttttttacttttagtagagacagggtttcaccatgttggtcaggctggtctcgaactcctgacctcaggtgatccgcccgccttggcctcccaaagtgctgggattacaggcgtgagcgaccgtgcctagcctaagcatgtttatagtagaaatagagaagaagaatttacaaaaagtaaataatcgtttatacggttggtatgtatgtcatgtgattttcagttgttgatagttttttatgtaaggcttatttaaagatgagagggagataggaatgatgaaatggtaagatagaaatgctaagatagaggaagtaaaagatagtctacacttctggaggtttttttagggttagatagaatgaatagaggatataaccaaataaaaagaaccaatggagaaagcagattatgtttgaccagagcagaggaaactagtatattggttttgggttacaaagacaagattattgttattttaccatttattttattcttttgatagttcagtttttcacatgaggtttgattataatattttgaagctgggagggactctagatgatatataaatagctagcctacatcacctcatttttacagatgaggaaacttgagtaattgattataagttaattgtccaagaacacatagctttttaatggcatagcagggtgtgttaaccatagattttgattgcatgcttgtgctcttttcccaatagtgtaaattttcttttccttaaagttctccaaaccttaacctgtctgaaaatgaaatataaacaagtaaatctatatagacatctgccttgtgattatcccctattgacattatttcttggtttatatgtttgaggtggtgggttgaagtggtaaattgcttaaatatttgctgatattttatgggttgtctatttgatgtctaatgattggcaataaatattttcttggcttagaaattagaaatactgggcttatatatgatatactttagatttactttttctgttgttaaaataatgtaaatactgaaatcacatttttttctcttcattttgcagtagtattattgattccacagaatacagccaacctccaggtttcagtggcagttctcaggtaaacgatatctttgtttgctttaatgataccatgagtataattatctgagttataaaatcatagattagtttactaaaatgtcctgtcacaaagacaaccattttgaatgcagtggtgttgattagcacttgaatagctcttatgcataatggtagaatcaaatattaatatttgctttttcaatgataagaacttaaatttattttcttcaccaagttgtgatggaacaaatctaaagtgttttgctttgtttttgtttttgtttttttgagacactctgtcacgcaggctggaatgctgtagccttgacctcctaggctcaagcaattctcctacctcagcctgtcaagtagctggccctatggaagtgcaccaccatgcccagctaatttttgtacttactgtagatctagatggatttcaccgtgttgtccaggctggtctcaaactcctggactcaagcgatctgtctgcctcaccctcccacagtggtaggattacaggtgaaaatcactatccctggcagttttttaaaacttactgttaatttcagaacctgagaggaaggaaatactttaggaaaaaaattatgaataatcagaacatagtttatcttagagataatgaaaattataaatctgtcattgaattacgcttcattacgttgaaacttaacagcttttccatggaataaagaccacagtcttgagtaaaatagataatcagcttgacttctttgaattagttgtatgagtattttaacctttactctcttcatctttggcttggagatactgatatctgtcaagcttatttttgaggcctaataggcttttttcgactttttatttttatattttattttattttatttttttgaaacagaatctcactgtctccaggctggagtgcagtggtacgatctcggctcactgcaacctcctcctgggttcaagtgattctcctgcctcagcctcccaagtagtcgggactacaggcacgcgccaccacgcccagctaatttttttgtagttttagtagaaacggggtttcaccatgttagccaggaaggtctccatctcttgacctcgtgatcctccccccttgacctctccaagtgctggcattacaggcgtgagccagcgtgctcagccattttttatttttctttttgagacagagtcccgctcctgcccaggctggagtgcagtggtgtgatcttggctcactgcaacctctgccttctgggttcaagcgattctccagcctcagcctcccgagtggctgggactacaagcgtgtgccaccgcgtctgggtaatttttgtatttttagtagagatgggggtttcaccatgttggccaggctggtctcaaactcctgatctcaggtgatctacccaccttggcctcccagagtgctgggattacaggcgtgagccaccactcccggccacgttttttaactctttgtattgaaataagttttgacttagagaaaaattacgaaaatactaaaaagaattcctttatagtttacatccagattgtctaagcacttaacattttatcacatttgttttatcattctcattcagcctttcttttacctatatatgcgtataatttcttttctggattgtttgagtaaggtacccacatatgtttctttacccttaaatacttcagcatgtatttcattaggaacaaggatattgtcttatgtaatcacaatataactttaaaattcaagcagttaatattgataaagtattatttataaattctagattttcagattttaagaattaccctaatatagcctgggcaacatggtgagaccccgcctctacaaaaaacaaaaaaattagttgggtatggtggcatgtgcttgtggtttcagctacttgggaggctaaggtgggaggataccttgaacccaggaggccgtggttatagtcagctgagatcatgccagtgtactccagcctgggtgacagagtgagaccctttcccccccactccctccccccgcaaaaaaaagaattaccctaatatcctttatagtaaaacaaaaaacaatgaggtgtttttaatgaacatttatttgtatattcactttatttgaaaaaatagtacacctatttttatctaagtgaacaataaatccttttggattatatcacttctgtttttctttttcttgtctccaaacttggatgactaccttgttacttttatgattagtttatgtgactactctgtacatcatcctgtattatattcatgtacaatgcatgcatttggcctattctttttttgtagtaagtttgtagattggtttgtatctgtttctgaacggtcatgaaaataccagattcaagtctttttgtaagacataatggaatacattaggagaaaatttaaagccttaaattgaaatataccgtaggaacttgagagagaatagcagtccctgtatctggaaactggcttggcatttatagctagccatttatgttctccttctgaatataatttcacagaacatcaacatcagacaaggctactccctgtgactgatgaagcgaaacaaaaagcaagatcactccataaagttgtctagccacgtttaaaaaacaaggtcactgtgcaaactataaaaaaaaaaaaaaaccctaccctgaccaatgtgaatggttgctgcttctttactggttaaaactttagcctccctgtagtcttctgtgctcctagataagatttatcattacataagttactgaattatagaatcattcccacttgacagtatccaatccacagtgaagccccactttcttgaactctcccacaaattatttaacaagtgccttaatcctttaagttgtttctaacactgtcttactgagccatctctcacttattcatatttattgctgctagcaataaataaaatttatttaactacaggtgtttttttaattggtctttggctggaggactttgaccaaactttatataggggaacaagaaaaggtttccacagttaccatttatattaacactactttgaaatttctagcaaatcctatgagctagaaaccagtagaaactgaatctgaatacagccttcagaatgtgagaaaatgttggcagattatctatccgacaagggattaataaccagaatatataatggactcaaacagtttgattgcaacaaataataatccaatttaaaaattgacaaaaactctaaatagacattttcaaaagaagatatacaagtggtcaataggtatatgtaaaaatacttatcactaaccatcagggaagtggaagtcaaaaccacaatgagatatcatctcaccatagttagaatggtattatcaagaagatagaagtaacaaatgttagaaaggacgtggagaaagagtgaatgcccctatactgatgagaatgtaaagtcgtacagccattatgaaaaagagtatggaggttcctcagaaaactaaaaatagaactgtcatatgttccaacaaccccactgctggctatatatccaaaagaaaggaagagatacctgcactcccatgttaattgcagcactattcacaatagccaatatttggaatcaacctaagtgtccatcagcagatgaaaggataaagaaaatgtggtgtatatacacattggaatattattcagccgtaaaaaagaatgaaatcctgtcatttgcagcaacatggatggaactggaggtcattatattaggtgaaatgagccaggaactgaaagacaaacaaacatcacatattgtcattcttaaatgggagccaaaaaaaagtggatctcatggaggcagagagtggaatggaggtagtaggcagagaagggaaaggcaaggagggggaatggagagaacttgcttaatgggtacaaaaatacagttagattaggtgaatgagttgtagcatttgataatacagtagggaaattatagttattactttattgtatatttcagaatagctagaagagaagagttgcagtgtttccaacacaaatgataaatgtttgacatgatagaaataccagttaccctaattgattattacacattgtatacgtctatcaaaatattacatgtaccccccacagatatgcacaaccatgatatagcaacttttctaaaaagaaattgaatgggtgcagcacaccaacatggcacatgtatatatacgtaacaaacctgcacgttgtgcacatgtaccctaaaacttaaagtataataataataaaatttaaaaaaaatgtagatccttgaatcaagatttaaaaaaaaaacttgaatctggaggaaaaagaaaaacaatcagaattttttttttttttggaaatattttagagtagcacttacttttatgtggtgaaggagacttttggtttgagatagtgcactgagacagtacgtaaatatcttctcatcccctcccacaagaaatcctattgctatattgctctcctcacacccacaacttagaataatttatagatgattaaaagagaaaatacttatggaagaagagctgactaatctctgattcactgtatgcatggtacatgtgtgcttaaggattaaataacaggtctgccaggagaattcttagcatctgttagagcactggctggttgttgaggaggaaaccctactagtgttgagatggagctgacatgatacattgcactgaaggccttacccttcatttctagctgtgctccagataatagctagacctaacataaatggagacaaaaacaattgaaatagtggatagtcgagtataagcctggcaaatgcaaactaaagaatactgtaaaactgaaaaaaacccaaaagtatgaacaaaatagacagtttttttcgtataaataaaatgtatactttccaaaagtagtaaaacttagtatcattaaggattggaatttatgtaaagcaaaatctgttagaaattaaatacttaggggctgggtgtggtggctcacgcctgtaatcccagcactttgggaggccaaggcaggtggatcgcaaggtcaagagatcgaaaccatcctggccaacacggtgaaaccccgtctctactaaaaatacaaaaaattagctgagcatggtggtgcgcacctgtagtcccagctgctcaggaggctgaggcaggagaattgcttgaacccaggaggtagtggttgcagtgagccaagatcatgccattgcactccagcctggcaacagagcgagactccatctcacacacacacaaaaaataaataaaaataaattaaataattaggtagcatttattttgcagttacttttcatagacagtgtttgaactattcatatttattaactaactttcagagctactctgtgagataaatactgttattattattatttttattttttgagacaaggtctcgctctgttgtccaggctggagtgcagtggcgccatctcagcttactgcaacctccgcctcccgggttcaggtgattctcctgcctcagcctcccaagtagctggggctactggtacacaccaccacacccagctaatttttgtatttttagtagagacggggtttcaccatgttggccaggatggtctcgatcccttgatctcatgatctgcatgcctcagcctcccaaagtgctgggattacaggcatgagccactgcgccctgctgataaattctattactattttttattgagaaggaaactgatacacagagaagttatggaggttgactcagataatatagctagtaagaggagggagctgagattttaacccagacattatggcttcagagtctttgcttttaaatactcatttattcaaccagcaggtttttggggttttgtggttgttgtcatctttttttgttgttttgtttttttgttttttgttttaaacatacctcatatttactaggctctgaggacacctcactggacaaaagcaaaacagatagtaatccttgctataatgaagtttccaatctagttggtaagatatttatagcaaaagtatagatgacttttgaatgaccaggatatgaggaagcagagatatgtctacgaatgtccctgggaaaacttcctaggcagagaacaagaagtaaataatccctgaggtggagaatgccttacatagttcagaagtccagtgtagctggagacaagtgaacaagggagataaaaatagaagatgaggtaaaagaacttaacagaggctacatttcatgtatggctttcttaggctgttagaaggagtttagattttttgagtgaaatgagttaagcatggcttaataggtacttgtctccctatatactttgcatcaaaggatatatgttatttattgtaatccttggagaatttcgaaaaattggttgaatctaagacaagataaatagtatcgtctgcattgtgtgaattagagccccaaataaacagatagagacagacaggcagtctagaaaagagtaaatgaagactcctctgagtacctgtgtgttaaaaaatcagtgcactcaaaaaataccgctagtggaaacattatttatcaaaaatttctggaatgtggtcagaattgtactaaacattcatagtcttgaatgctttcatttttagataagaatgaaaataaatgaacttattatttatccaagaggctacattatcactagatggtaaatatagaaagaccaaaaaaaagcccatatacaacataaattgaaattagctattatcatgatactgagtacattaaaataactaagacagtgttgatgcatactaataaaaatcacattcttaatgacatgtaattttaaagaagaatgtaaaatattaaaatagttcagattaattttaggacaattgggatagaccagtaaccataattactaatttaattagattccaatttaaaagaaatcccagtagttttttttaagggtgtgtagaatgtggccaattaacattgtaaagttcattagtacaatgaattattcagaagttaatgatgaatttacctcatcaactattaaaatgtactctaagactgctgtaacaaaagaagcagaataaaaatttaaaatctaccaaaaagtaattaatagtctgtgataaaggtggtcatgtagatcagtggtgaaaggagagattaaatgcatggtgttgggacaaatgggaaactatttgaaggaaatttagcttgttttcacttactgaaagagttcagttcagctaaacaataatttaaacagcaatagaactatagaaatgaagaaagaagtctaccctacatataagaaagcaccacaaacaaaatttaaacccaaattgagaaaggcgtcataattagggcaagtaaatggcttaattgcttcaaaatattaaaaattttgataattttatttattttattatttttttgagacagagtctcactctgtcgccaggctggagtgcagtgacgtgatctcagctcactgcaacctccacctcccgggttcaagcgattctccagcctcagcctcccgagtagctgagactgcaggtgcgcaccaccgcgcccagctaatttttatatttttagtagagaaggggtttcaccatgttggacaggatggtttcgatctcttgacctcgtgatctgcctgcctctgcctcccaaagtgctgggattagaggcatgagccaccgctccaggccaattttatctttttaatgaaagctccaaatagagtaagaaaatggttcaggacatcaatatttttaaaagacaaaaattcacacattcagctcacatgaaataatactcaatttttgcaaataaataaaagcaaaatatagaataatactagataccaaagaaatcatctgatagttatggctaaaatcaaagggatgttccaaaatggaattactattacttgcaatgagtgtatgtgctcaaccatgtgcatattggggaagggtaggtggaggaagggagagtggtagttgagttgatagtcgtccaggaagataatttggcagtatatacatgtgatcaatgctaaaatagtttgatttggtaattatacacaaatttatttcaaggaatgattctaagtactatgtaaagattgtatactggtattaatcatatgtgcaaaaattctggaaaaataaacatgcccagccataatagaatagttacagaaatagtgctacaactataggatggattactttactgctcttaaaaataatatttagtagttgaattgaaaaaaatgctaacaatataagtgaagccagaaatgtatgaactttatagagttatatttctgaacttttgtaattgcctattgattttgctttagaatttttatataaccatagtacaattagcaaaattaaaaaattgatgtatctcagaaaacctaaaatttttactttttaattttttacaaattaaatttcagcagtgtattcactaatgtcctttatagaaaaaaaaaaaaatctggtccaggaccaattctgaatgacttgttgcatttatttgtcatgtctctttaatctcctctaaattggtacagttcttcagtttatgacatcaacattcttgaagagtgtaagttatttataggatttccctcagtttgaatttgtcttgtgtttccttatgcttaagattcagattatctattttcgtcaggaatactatagtagtcctattttgtcctccttagtttgtcatatctggaggcatatggtatctatttgtctcagtgctggtgatgttaactttgatcactcgattaaaatggtggctgccagatttcactgctgtaaagtttcttccctttgagcatctatcattgtatcttacttataataataattgttaatgtgttagttgtccaaatgatgattttctgagtttttatatcttccacatttattagttagtccttctctttgtatgtttatattgttgtggaatcctgggtcattaatatatatattctgttactaattttgaaactcaaatcatcttgtatttggctagttggagctccttcatactgacttctgtatccttttgacatatttctatcattctttataagtactttcttagacaataatgttccagcttcattccgtactgaccttgctccagtcctggaatagtcttgtatccaagaaacctcttttcttttagtggagaaatatattttaaaaccaaaaatcttaagtatgctcattgttcttggagtatcattgcttgcaagctttctcagtggacagagctaggaaatatatgtattcatatgtattaatatacattgttatatatttatatccataatatatatgcattaattacatattaatcactgtgtttgattactgaaggactcccaggaatcaaaccatttatatttctggaacagtgtgattacaggcaatggatatacagaacagcccagcagcagtagtgtatttattgaaagggatccagagaattcagtcacaatattctttgtccttccactgctaggttgcaccggaattgctttgtcaccagatttagaatcactactggcttgggtttgaagcacctgaatgccaggagatccaaagtcagcttttggttggagtctctaattgtgagctagtcatgtaaccactcaatggattcaccttgcctgctgcctagacagagtcaatttatcaagacagaggaattgcgataaagtaattcatgcagagccgctgtgctgttactcaaatcagtctccccgagcatttggggataagaatttttaaggacaacttggtgggttgggggaagccaatgagccaggagtgcctgattggttaggtaggagatgaaataatagggaattgaagctgtcctcttgcactgggtcaattgctgggtgggggcataatatcagatgggccagttaatcaatctgggtgttgccagctgatctgtcaagtgcagggtctgcaaaatatctcaagcactgatcttaagagcagtttagggaaggtcagaatcttgtagcctccagctgcctaacttataaacttataaactataatttctgatcttgtggccagtgttagttgtctagttgccaggcaagaaggaggtttgttttggggaaagggctgttatggtctttgttttaagctgtaacctgtaaattggctgggcacagtggcccacacctgtaatcccagcactttgggaggtcaaggtggatggaccacctgaggtcagaagttcaagaccagcctggccgacatggagaaacctcgtctctacaaaaaatacaaaaattagcagggtgtggtgatgtatgcctgtaatcccagctactcaggatgctgaggcagaagaatcacttgaacccatgaggaaggagctgcagtgagctgagcacacgccaccacagtccagcctgggcagcagagcgagactctgtctcaaaaaaacaaaacaaaacaaaaaacaaaacaaacctgtaaactaagttcctcccaaagttagttaagcctgtgcccagtaatgaacaaggacagcttggaggttagaagtaagatggagtcagttaggttagatctctttcactgtcttagtcataattttgcaaaggtggtttcagtcacttagatgcatacattttggttatgtgaccagctttaatagatactactgaaatcaggtgcaaatcatgaaaatcatgaattcaattattattactaaacaatgctgaccaactgatgtgttttgcgccaaaacaactccctgactcatgattacagaaaattatttatctttagttaatatattctatagcataggcaagggtcagtggtcagtccatacaagctgaggtcaatccatgctattctaccatgtttagggttcattctggcatttgtcctttctatatttataatttccttttctgatggaaacctagctgtcacgatcaaaatacacttacttatttgcatggtcttagaatatatatacaaaagttagcatgaaaattgctgagaaaaccaatgtaactagagatatttctttgaaattccgtttgtctttagcctgagaatatatactgaaaatatagtatattcaaaggttatttggatttgtttaattttcttcaattttcgttgtgatatttctttgaaatacagttaggttcatttacttctatttgtatttcaccccactttccatccttattatatatatcctttttgaatatgtaaaatattaccctgattctaaaaatcagagctgtataaaaagttataatcaataacggctaccctttcagcttttctaccaatttccctacctccatcttttctactccatttctacttaccttctttaggtcaccaattttattagtcagatttacagatacatatgcacattttcttatttttactctctttcacaaagggtagctttctagtaattttttttctgtactttatttaacaatttatgaggaaggtaactctatggaagttcatagaagtcctcctcattcttttttacagctgcatgaaacttgtcatgtggttgtactgtaatttacttaatcactttgttatataatgacaagtacgcagtttccattattttgaaattacagccagtagagagtgactaatttgtgcctatgtattttcatattattggaggtgtactttcagtgtaaatacctagaagtgggattgctgggtcaaaggtatgaatggatagtaccaaataaaccaccctccaaaagcagtttgtgtcttcaccaacaacatgtaaatatgtctgttttccccacagcacctctaacagaatgactttgaaaagtttcatagtttttaatttttgccaatatattaggtgagaaatatatctcagaatagttttgtgtttctttaattataaatgagattgactatgttttcatatgtttactggtttactaatatacttattagtgagtagtatactcatatctttagctgacagacccttttcttctattaggtgcttgactttttgggttcaatttataagactttgttatattaggaatactagtctgttacctatgacctgtgttgcctatattttcttcctattttatttttttaccattcaaaagtttttagttaaaattatcaatttttaaaaattacatctagatctttgaatcacagttaaaagcttctccctacaaccaggatgtagagaaaccccttgtttcttaaaatacttgtctcatctttatttttttacatttaaattctcaatctatttggagtttattttagtgtatgttttgaaatgtggatttaatttcatccatccaaatgactagctatgtgcccccagccctattttaaaaagtttatccatctgctggtctgtttctgtttctgtattgttatcattcctttattgtagacgctttatgatatgttttaatgtctgatacttctcttcttcccctatcttagcttctctttttcattgttttagagaatatttcttcctgtttgttttttcataggaactttagtatcagtttatctagctccctaaaaaagcttcttggtattttttattggaactgcctttatcttaccaattatctcagggagaattgacatctttatgatactgattttaactctaggttttgcctatatttttcataagtttatttctaagcattttttaaagctgaaaatttgtttttaaaaatttgaaattaaacttttaattttgagatattaataattatagatttacatgcagttataagaaatacagatttagcatctgaaatctaaaaatccagaatttgtaatgttccaagatttgaaactttttgagctgtgatatggtgctcaaaagaaatgctaattggagcattttggactttggattttcagattaggggtgctcagttggtaagtacaatgcaaatattccaaggtagggaagaggatggtttgcagagcttccatgccctctctgggcatgcatgctctcctgatcatcctagacctcagtgtgttcaccaacctggaaactcattcaatcttattgtttaggagctttatagagttttatagagcttaatctccaggcctcacccgcttcctggaggttggtgtgtgtgcaaaagttccaactaattacttggtgatcttttgaccagccttatcctaaggctttgtgggtgtctcaccctaagtcacttcactaaattcaggtatgatcaaaaggaacttgctgtgaataacaaaagatgctgatatcactcaggaaactccaaggattttaggaactgtgtgtgaggaactgtaacaccctaatgggttccccttcccccactgcctagacagagctgatttatcaagacactggaattgcaatagagaaagagtaattcatgcagagccagctatgcttgagcccagagttttattactcaaatcagtctccccaagcatttggggatcagagatttttaggataatttggtgggtgggggaagtccagtgagtcaagagtgctgattagttgggtcagagatgaaatcatggggaattgaagctgtcctcttgcactgagtcaattcctgggccagggccacaagatcagatgagccagttaatctatctgggtggtgtcagctgatccatcaagtgcagggtctgcaaaatatctcaagcactgatcttaggaacagtttaaggagggtcagaatcttgtggcctccagctgcatgcctcctaaaccttaatttctaatcttgtggctaatttgttagtcttacaaagacagtctagtccccaggcaagaaggaggtttgttttgggaaaggaaagggctgttttcatgttttttaagctgtaaagtaagttcttctcaaagtcagttcagtctatgcccaggaatgaaaaaggacagcttggaggttagaagcaagatggtttgtttaggtcagatctctttcactgtcttagctgtaattttgcagtggcagtttcagaactttggacagagaccaagtatatttcttagaccacatttccttttcatgtgtgtagtgatattgttgcaaaactttctccttagttcagctaaaactgggctcttgtcacacgaatgggaaagattaggcttgcaggcacgtacaagggtgaggaaaacgtaatttattgggcgaaaaggaaaaagggaaaaataactctcagcaaagtgagacagaatcctgctagcaggtttcttgcctcacagattgaatcccaggtcaccacccagggacaagagagaccaggctcctccccgctgcaaatggcacaaacttcctgaggccccaccccatcctctcagtgtgcagatgggtattattcagaaagaatcagctgggaaagggcaggcttcatccaggatgggcagtctggtttttcagccttcagactgttttaggcttgaaggaggggttttgcctggggacacttggcttcctcctgtctctatcattttctcctctaaagaagtatatatctaactgccataaggataaggaggaagattaatcttaactgcttcctgctgacagggtgtgctgttttgggaaaatggcagtcagatctccctgagaggcctgtctaagggtcccatcaaaaggggccatcatctgaggcttcggttgcatgaccatttggagtgtgatggcctgaaggcaagaagagacaactgggttattagaaaacatgtatcaaaacaaaataagtggggagggtgtgaggacagctaaaaaatctcgagaccttttactagttagtgcagggagatgggggcagaagcccgactagtaaaacaaacttttaccctttgctggcatgttgggcttctgggttcccttcccctgagcccaatcctaagccaaccaatttaaggtttgggaaattaacttttcccagtttggaagatgcatccaaggggagtgtcccatagtacaaagacacgattacttatcagtgaagagaggacagaggaggagaaaggaaaaagaaagcctttttttttccaaaggagtcctgggattcaggatgcattcaaaagggttacagagtgaagatgaatggctgcttatctagaaagagaggagcacggtgccccaggttcccttctcttcctagcaaatacctggagtatttgagggagggaaagtgaggtgttcctctttctttcctctgtccttggatcccgagtcccaccagccacgatagggtgccacccatgggtgtcaaagcagctttcactgatgttgatggtggggggcatgctacagggtgggagtattcactcttacccatgtacaccttatgtcccctgctgtcagtagcctttgaattccctagaccttatttatgccatggatagtagcgtgacctttatctatgcaatgggaagcttggcttagtaagaatcagtcacactaacctatgctgtgccttttaacttctgttatcatctgcctctggatccatcagatccggttttctttcctagggctttgacccaaagcttggaattgagtttgagacaaaaatgtgtcttggggggtgggggtgttgcacggactccttttcttaagctgaatgctatggtgaagctgtggaattgagtcctgctccaacaagggagaaaaggatatcttgtgacaccccagataactggtggatatagttatgcctgctaagatttgggtgcatagttcttgtctttggttagctcccttgttcttagttttccaaaaaggaaacctccgagtgacgggcattctgtttattcccatcacccggcaggataattgctcagaactataatattgatccagatttctacattacccatcccttttgtttttttctgagctgcagctggaaactactgtttggttcacaggaacaagcagggttagtctaaaatgtaggcaaacacttaaaaataacaaaggaatgtagaatttaatgacaaatatatgataagtcttgaaatataatttatctctctccagtctttttttttttttttttttttgagacaaagtctcgctcttgtccccaggctggagtgcaatggcgctatcttggctcactgcaacctccacctcccaggtacaagcgattctcctgcctcaccctcccaagtagctgggattaccggcgcctgcctccacacctggtaagttttgtatttttagtaaagacggggtttcaccatgttggccaggctggtctcgaactcctgacctcaggtgatacacctgcctcggcctcccaaagtgctaggattacaggcgtgagccaccgcaccctgccagtccttatttttgttaaaaaacaaatcatgataggattgaattgtttgcaaaatagaccttagtcttatacttggcctgattatttgtttaaagtgcagcaagattaattatttttacataggccttttagattggcttggacggaactcttccacaagaaatcccagataagaccttttaaagccaagcccagccatcagtttgtatcctcaaatgcctgtgagttgggtgatcctgctctcttaacgtctcaaaataaacttggagctctgggcctgtagaaggtgacattctttacttatcacaggtcaggaaccctctacagcagctgtgtagacaagggtatgaggccatttttcccaaggggcttttattggctctgcaagtcgagcttgactccttaaagggaagcatacccttcaagttaagccttggtaaaacaacatttctccagttgcatccagttgcaaaagaaaatggattcttattgcactgatgtaaacaactatattgccataagttaagaacacttacaactagtttccaaattctggagaagccagggagagagagagagagagagagagagagagagagagacaaatatgctccaaatttttttcacaggagtgtgccatactcatttattaaagactgtaaatagttcaaaataagtttccttgactatgaaaaaacaaaacaaggatcagcaatattccaagcaaaagttaaaaagattacctcagtttttggtgagttcagttcatttagttaactcttattttgcttgatattcatcaacattttagttcttcatgagtcctgcacgtttttcctgtattgtaatgttacaatctccaaagttattagaaacctgtatttgagagtacctgttagagtcctatagcttgttataagccattttttgaaaaggatcaaaacaagacagcaattgtctgtgaataacaaaatgtccagggtagttacagttagaagcacaattgacaaagtagtttgattatctctgtggtttacaataacttaacataacaaccttaattatgatggatagcatatactttagacattagaatttttggaatcccatacagttttgaaacatatattagtagtagtcaccaaaatataacctaaagaagattgaacaccattttggcaatctcatgtaagtaaacgtgttctgtttacccctcatttggatactccagggactctctgcagcatccaaaagctaggcatcaggaaagacaattttgaaactgaagtttgattttgggaagcctgttaaatatgttagaggtttaaaacacttgatgttatgaaatagaattccaaattattccaggtaagttatttattttgccaaaatgatgactcagaaatttgaaaaacaaaaatcttttataaccctttacaaattttcctaaagagcagattagttccttaagagtacgtttttctgcttttatttcaatgcttagtttacagaaaaaccatataatgcctttttgaagttagtcaatatgttaacacagagaatttattttggaagattaatttttacaatccttccatcacttgtttgaacttttagctttttttgtttgtttgttttttgagatggagtctcgctctgttaaacttttagctttatcttatctaattcagaacaatccttagaccctaggcaaaaatttacatttccacaccttcttataatcttttattaaaaacacatcataacacacctcacatgtaaatctatttccaatagtttcaattacatattataatggtaactcttagcaattttacctttaaaacctggtaaattgttttaattatttgcttggtgcagccaaggtttgacttcttccagcataattaagggcatggttagttccttatgtcgccaggttttaccaaatgtggagccatcaagttagatcgttctcaaaaaccaaaaaaggcaggttataaccttaaaacatttagcaaacctaatatctgacctatataatttagtttacctatttacattttgatgacatctgtattttaccaataatctttaaggctgttttttatttcttaaagattaaagtcacgtgaactgaaaggcactacagcttttattttccttttaaaaaacatttgatcaaagtgtttatcttcctttaggccaattaattagagctttttttttttttttttttgagatggagtttcactctgttgcccaggctggagtgcagtggcatgatctcgactcactgcaacctccgcttcccatgttcaagcgattgtcccgcctcagcctcccttgtagctggaattacaggcatgtcccaccacacctagctagtttttgtatttttagtagagatggggtttcaccatgctggccaggctggtcttgaactcctgacctcaggtgatccacctgcctcagcttcccaaagtgctaggattacaggcttgagctgctgcacccagccagtctataaaaaaagctctataaaaaaaagagcttttttatagacatcacacacacaacacatatatatgtacacagatagacagaagaaaacccaattgccataagatctttcatttgccagtctcctaattgaattaatggtctccaggtggagcctttaagagacagggctaggaaaacattcagcttctaaggcctaacaaacaggcataaatgaggcaaaaacagattttgagagggatctatttgcttttaattactggtgttccatgaggaaaacagaggtctcttccttctcatgtgtgcattgagagtggcaaggaaaaatggagaaaaataattcagtcgtttttttttcaacaaaacaaggtcctagaagagaaaaacataaagaccttttacctatgcctacaacttggatatctacttttaattaagctgagtgttctttaagaaaatccttttaaatcccctattacctgactttagccatcccaagtggccaatatttctggctttcaaactttactaaaggctcaaagaaagtaaaatccaaggcatttcgtggaggggaagagaatcaacaaatagcaaaggttgcacaggtatcaaaccaaaaaggactcattccctaagccaggatcgaaccccgggccacaaatgtaaaatggcagaggctagaacaaaacattgtcatgtggttacaggtctggctctgaaggacgtaaaacaagatggaggcctgcagcaaagtttgctacttaccatacagaaagttatgtaaagcagaccagattggctacagcttaagaccaatataaatcctttttcatagttaaaactttacagagaatataaacagtgatagttggggtcttggccttgtaaaacattttctaaaaaggaaaaaaaaaatcctctcacgtaaaagttaactgctaataggtagagaaaaaacagttcatagtgtaagggtaaccctgggagaagaacctcttattcttatacaaatgggttcctttccccctggctcagaccaatggtagtctggccagtcaaccatgcagggcccaggcccctgaggccgccttggggcctggacagtggctgtggctcattcccgccctgtgtggtcgttggacactgcactcatgtggcagacatggccatgcacccaaaccaggaggtaaggggagtggggagctgccattcgcccaaccatcctgagcctgagcctgtggccatttaagtgggtgtggaccacctccagtattataaaagaaaagataggtgctgttactgtcctgaaaaaaaaagaagaggcatgccataggaccaaaaggctcagaagcgaaagtgagaggttttgggttcacattttactcacccttcctttggcctcacattgggcagcaaaaatgctgcagaactctctccttagttcagctaaaaccaggctcttgtcacacaactaggaaagattaggcttgtggacacctagaaggatgaggaaagtggaatttattgggtaaaaaggaaaaataacgctcagcaaagcaagagagagtcctgctagcagataaagtacagtgcatacttctcattttgtcacagaatagtaaaaaggtatacatgcaaaggcctggatttaatgcaggatttaatttgtgtgaccttgttaagggcatccttaagtgaactgattcttaacagatttttatatgtttttttaaaaaaaattatgaatagtaatgaagaacagtgtctaccagtcggatttggtgctgttgcctttatttgtgctaagagaccagcagtcttatactgatctttgcttttgtatcacaagtacaaacataagcacaaggaaaattgcaaagaacatcttttttttttttttttttctgagacagggtcttgccctctcacccaggcgggagtgctgtggcaggatctcagctcactgcaactacctcctgggctcaagccatcctcttacctcagcctccccaatagctgggactgcaggtgtatgccaccatgcccagcttatttttttttgtgttttatagaaacagggttttgccatgctgcgcaggctggtctggatccggactcaagcaatctgcctgccttggcctcccaaagagctgggattacaggcgtgagccaccacaccaggctgcaaataacatcttactatttttaagaacatagctttgtcctcccagattcctgaaaagatcttagagaactcccagtggtcctcagccacattttggggatcacactatgataaccactattctaaattctgtaactctttgctttaaagctagtcattaaatctgcttgtatgaaaatgtgtgtatgggtttaatagttaatttgttttattattttgtatgtattccttgaacttataaagtttacttattgtgtaaataatgatagttttccatgcagtgttaatttatgaaattagtttgagaaaaaagtatttgtagattggaaaaatttcaggtttcagtcaatcatacagacacttttagcttcatttgaagtaggagtctcctcttagtggaattgacagggaactttgccatggtaagttacttattttattatacaagcattgatttcattagtcttttgaagatctcattgcttttgtactccgctattttatattaagtatatgaaatagaatattcagttttgcttgctgcttttctgttttcatgttaattgcatttattgggaattaaagtagttatatgtgtaaagatttttcataatttacaggctgaccataaattatctttttgtatgatcatctaatttgctcttttatcttcatagtatgcctattaactttctagcatttatttgaggacttttttttttttttaactttttccaatgaccaaataagatatgcttctgtttttgctgtggtgaaatttaattatctttgagtttgctaaatgtgatcatttttctttagaaccaagctaggtaaaattaacatagttgataaatatttctgtttgatttgtgtcgtatttatatctacctctaggtaaaagagcttatcttgaaattgttttatttgaagattggccttgtagactatctgcatccaatatgtattttcaaaacatttatctctgcatacatagcacatttctattttttatattaatattatttataatttaataattaaactggcatatgatgatgacccaagtgttgcatatttaccaacaattataaggcaacctagttgcttgtagagtttttgagtaaaggatttactctagggttttgaataaatttaagaaatgtcaagaataaatacaggaaaataattgagaaaatgagtttactataaaaactggaagccaaataagtaaaacaaaacagtgttgctgactacttcctatttgttttatatgccctgttcctgattattgttaattattctcatctttcaggctttgaagtcttatctgtttttccgttaaacagatcacttttttttttttccttttttttttgagacagagtctcactctgcctccaggctggagtgcagtggcacaatctcagcttactacaacctccgcttcctgggttaaagtggttctcctgcctgagcctcccgagtagctgggactacaggtgtgcgccaccatgcccagctaacttgtttttgttttgttttgttttgttttgttttgagacagagtctctcgctctgtcacctaggctggagtagtggcttgatctcggctcactgcaggctccgcctcccaggttcacagcattctcctgcctgagcctcccaagtagctgggactacaggcacccaccaccacatttggctaatttttttttatttttagtagagacggggtttcaccgtgttagccaggatggtcttgatctcctgacctcgtgatctgcccacctcggcctcccaaagtgctgggattacaggtgtgagccaccgcacctggccactaatttttatattttgagaaggggtttcactgttttggccaggatagtctcaatctcttgaccttgtaatccgcccacctcagccaccgaaactgctgggagtacaggcatgagccaccatgcccagccagatcacttttgaagagatctgtaggctaaaatctagaattacaatcttagtattattaaaaaatatgttggtacctacaaaggaatatatttcattaatatgtaaattagaaatatagcaaaacttttatggaactggcttctgtgttagttatttaataatagaatattaaaagtagtatacaggttactcatgtgttcctaaccaattttatcacctgcttcctatccaaatataattatttttctgatatttatgtttatcaatatgttgacttttaaaaaagttttaccacatatatacacacccctatattatttgttttggctgtatttgaactttataaaaatattatagtaagatttctgagatttgttttttcagagattaattgctgatgcctgtggctgtagttgtcactgacgtataatattccattgtgttactatactacaatttttcagttgaatctgtatacattacatgcacttctagggtttttgttgttcttgctattaagggcatctttgtacatgtctccagatccacaggtgcaagagtttccctagatatgtacctaggagaggaattaaagggcattgggtatgcaaaatttgtattttgagttaataacaaattgttttccagtgtacttttatcaatttaaaactcccactacatgagtgtatgagttccaggttctcagcattcttgctgataattagtattgttggactttaaaatgattgtcaccttagtggtaataaatagagcatagttgcgactttaatttttattttcctgccactataaaacagcaccttttcttatatttattgtcctttatgttttgtcttttgtgaaatggcatttcaagtctttccccatttttttgtgttggtcttagagaaatagatatattctggatactaatcatttgtttttggatactgcaaatatcttcttacagtttgtatcttgtctcacctttttaatgattaattttggtgaacagaagttcttaatttctatgtcatgcaatttataatttttatattagtacttcttgtgtttcatttaagaaattctgccctttctcaagattgtaaacatattatccagtaacatattacatggtcagtttttgtaaatgttctatgcatgcttcagaagaatgcctatttttaaattaggtacagtgttttctatatattcattatatcaaattttatatttggccatatataaactagtgttacttgcataacactagttgcataactcagttgacttgcagatttatctcccattgtgttaataggtttgtccacttctctggcaatttctgcctgaaaaatgttaaggctctcttattacatacagatgggttatgttaaattgaaccttttctcatatacagtggctgttttcatccatattaatgtttttcatcttgaatctattttttctcttttagttagtattctttcatgttattctaattttttagtttgtctctgttttaagtatttctttggcagatagcatacctttattttaaatctattatgtcactatttctattagtgattgtttccatttacatttattgctaatactgatataatttcattctgttttacttattatacttctgtttttctcagtttttgattttttttcttacgtttttacctcccccaccatccctcttctggttcgattgttacctgttctatcactgtgctttcagtagttgtctttgaaatttattcacacttatcatctaagcagagtatcttaattatcttaattaccttcctgaacaatacaagagctccagaatgcaacttttttcactttcttctgacttatatattgttacttggataattttttgtcttattcttaagccccataaactagatatgacgattaatagtaatatttagaatcacttatttatttgctcgtttccttgctctctttttttattttgtgtctcagatcttccagttggtgtcattgtattattcaagtacacaacttcagaagtttttttttttgtttttttttttttgagacggagtctcgctctgttgcccaggcttgagtacagtggcacagtggcacgatctcagctctctgcaacctctgcctcctgggttcaagctattcccttgcctcagcctcctgagtagctgggattacaggcagaaattcttttagagatggctcactggtaataaacttcatttttgtttatgatgttgtgagatagccttttggggttctgaattttaggctgaaatttttttctctcaacttttttaagattattgatgtcctttttgctctagcttctttctactgctcttgaaaagcattttgcctttttaattgttgttcctaaataaattatctttcttttggttttaagatatttttgctgtatagacaaaaacacagtttcaccttagtgtgtctaactgtgggtttctttttaattatctcacttgatcggaataatttcactttctgtgtattcatgtctgttttcagttctggaaaaacctcagccatcaactcttccaatatttcttctttagtttcttggtcttttcttctgagtctctggccatatttcaaactattattcttttatgccttttatattgtttttcaaattttttgtcttcttggcttttatcctacattctaggcagttctttcagatttctcttctactttgtaaattctgttttcagtttccctacttgcggtccctgggcttaattctccaaattccagttcaattacttttgtgtaggtattgtcctcctctttccccctgccctgtgctgctgctgttatattttgtttatcattacatctctgagttcaccttcctgtttgtctgttaagtctttgaaaattatcttactttcttgtgagttattgacaaagagagtcaaacgctataaaatatttaaagaagtttatttggagacaaataaacttttttaaagaggtttatttggagccgaaaaaaccaaaatgagtgaccctggcctgaggcatagtctcaagaggtcctgagaacatgtgcccaaggtggttggtatacattttaaggagacataagacacctgtcattacttaggaagtttacattgattcgatctggaaaggcaggacagcaggcagggacagggggtgggaacagggattggcttacaggtcacacatggattcagagatttttagattgactcttggttcaaagagttaagttactatccaaagacctgagattaataggaaggagtgtctgggttaagataaggggttgtgaagaacaaagtttttatgtagatgaagtctcataggtggctacctttagaggcagtagatggtaaatgtttcctaattaggctggactctcagttaatctcttcaggattgggagggcctggaaggggaagggtgtagttatgttaatacagatgcaaaattttcctcacaaaagactgctttgcaggatcatttcaaaatatggcaaaaaactatttgggggtaaaatatattgatttccttctttatttgtcgtgacattattcagagtcaggttgaaaactaagagagattatatagggttaagtaaaacccatctgatgagattttatcgtttgtagggcatgactgcagtctccttaaataggaatttgggcaagaaagaaaaaaactcagagtttaggtctcagagtgaagcagtgctttaaaatatgactcttacctcctcccatctagttttatcaaagcagggatacactgtagtatacattacagtaccttagtactttttactttatgcatttggcattgtggtacagttgttggtgaacttgtgccagcaggtaaataccatacatatttaggaccacaaacctttgttttttataggatttatatgctaacatttttcaagtttattgccttttatctgattttgttattttgttcttctaatgaatatatcaaactctttggcatgtgtatattattgcctcttaatctgataatcagtattaaatagattgttgttgttgttgttgttgttgttgttattgttttagacagagtctcagtctgtcacccaggctggggtgcactggctcgatcttggctcagtgcagcccctgcagccctggttcaagtgattctcctgccccagcctcccaagtagctggggtcctgccactgtgcccggctgatttttgtatttttagtagagacggggtttcaccatcttggccaggctggtcttgaacttctgatctcgtgatccacacacctcggcctcccaaagtgctgggattacaggcgtgagccaccacgcccggcctaaatagattttttttttttttttggagactgagttttgctcttgttgcccaggctggagtgcaatggtgcgacctcagctcacttcagcctctgcctcctgggttcaagtgattctcctgcctcagcctcccgagtagctgggattacaggcatgcaccacgatgcctggctaattttgtagttttagtacagacggggtttctccatgttggtcaggctggtcttgaactgccgacctcaggtgatccgcccaacttggcctcccaaaatgctgggattacaggtacgagccactgcgcccggccaaatagatatttcttacagctaagaactattccagtaattccaggttgtaaggctacagtgtagggataatgaaaaagcaattcatttttctttttttggaagtaataataaaataattttttattatgccttctttgaaatggaggtaaaacacatataaagaaaagcgcagatcttatgtatttgcttgagtgagatttgacaaacacatacatgtgatcccacaataccgagatgaacatatggaacattcatcttgccttatgctcctttcaaattcagtcccagttcttcaggggcaaatattatactgacttctagaaactcataattcacctgtttttaatccttatataatgaaattttgtaataacattaccttttgtgtatgactgtcattcagtgtttttgagattcattctgttttgtatgtatcagcagctcattctttttttttttatgatactttaagttctagggtacatgtgcacaatgtgcaggtttgtcacatatgtatacatgtgccgtgttggtttgctggacccgttaactcgtcatttacattaggtgtttctcctagtgctatccctcacccatccccccaccccatgacagaccctggtgtgtgatgttccccttcctgtgtccaagtattctcattgttcagttcccacctatgagtgagaacatatggtgtttggttttctatcctgcgatagtttgctgagaatgatggtttccagcttcatccatgtcgctacaaaggacatgaactcatccttttttatggctgcatagtattccatggtgtatatgtgccatattttcttaatccagtctatcattgatggacatttgagttggttccaagtctttgctattgtgaatagtgctgcaataaacatacatgtgcatgtgtctttgtagtagcatgatttataatcctttgggtatataacccgtaatggggtggctgagtcaaatggtatttctagttctagattcttgaggaatcgccacattgtcttccacaatggttgaattagtttatactcccaccaacagtgtaaaagcgttcctgtttcttcacatcctctccagcacctgttgttccctgactttttaatgattgccattctaactggtgtgagatggtatctcattgtggttttgatttgcatttctctgatggccaatgatgatgatcactttttcatgtgtctgttggctgcataaatgtcttcttttgagaagtgtgtgttcatacccttctcccactttttgatggggttgattttttctcgtaaatttctttgtgttctttgtagattctagattttagccgtttgtcagatgaatagattgcaaaaattttctcccattctgtaggttgcctgttcactctgatgatagtttcttttgctttgcagaagctctttagtttaattagatcccatttgtcaattttggcttttgttgccattgcttttggtgttttaatcatgaagtctttgcccatgcctatgtcctgaatggtactgcctaggttttcttctaggtttttatggttttaggtctaacatttaagtctttaatccatcttaaattaatttttgtataaggtataaggaagggatccagtttcagctttctacatatggctagccagttttcccagaaccatttactaaatagggaatcctttccccatttcttgtttttgtcagatttgtcaaagatcaaatggttgtagctgtgtggtgttatttctgaggcatctgttctgttcgattggtctgtatctctgtttgggtaccagtaccatgctgttttggttactgtagccttgtagtatagtttgaagtcaggtagtgtgatgcctccagctttgttctttttgcttaggattgtcttggcaatgtgggctcttttttggttccatatgaactttaaagtagttttgccagttctgtgaagaaagtcattggtagcttgatggggatggcattgaatttataaattactttgggcagtatggccattttcacaatattgattcttcctatccatgagcatggaatgttcttccatttgtttgtgtcctcttatttcgttggaaaaagtaactcattttctatttgataattattttctaacaatttctggatattaagattcccaaaatcaggccaggcgcagtggctcatgcctgtaatcccagcactttgggaggccgaggcgggtggatcatgaggtcaggagatcgagaccatcctggctaacacggtgaaaccctgtctctactaaaaattcaatataattagctgggcgtggtggcgggcggctgtagtcccagctacttgggaggctgaggcaggagaatgtcgagaaactgggaggtagagcttgcagtgagctgagatggtgccactgcactccagcctgggcgacagagtgagactccatctcaaaaaaaaaaaaaaaagaaagattcccaaaattctaaattttagaatggcataatgaattctgtcttcattttatttgtagaagtgaagatgtttctcattttagtcttgtaaaactgtcctttagagcttatttttagtcattattagttttaatcattctgcgaatgaatttggtttctattttcatgttaaaagataaattggaaaatatctcagaattacagttttttactatttgtgatcattttactgtgatgaacttctgagggtaaatgctcaaacatttgagtattctgtgcaaaagaagagtattgtttattctaagttttgtgtcttttcttattattttagacaaagaaacagccttggtataatagcacgttagcatcaagacgaaaacgacttactgctcattttgaagacttggagcagtgttacttttctacaaggatgtctcgtatctcaggtatatatttagaccttctcaaattatctgaaatctacatttcagatctgtttctaggtttttgtgctgaatttatggaaagtcctaattgcaaagcaaaagtatgtatttttgacatagtctaccagatcatcatggaggttcttagtgatcttagagaatgttactttccaatgactattttttgttctatatttgtgaattctgaatctttatatggcaagctagataaagttaaaaagaaattcagctatgaatatgtagccaacaaaaataagtttcattcagttgcctcctatttaacattaaataaacatgaagttctaagcactgtcctctgtgctaagaataaaaagatgaaagaactggtttctgtcattaaggagtgttgtaaatcgagtcagggaaagcaacagataaacagttctgtgtgatattatgtgttaaataagtttacaggagtatcatgagaatagataataatatccactaatacaactgatagtaaaaaaaaaaatccaggccgaattgaaaatggggaggtgtaagggaatgatcagtgtagggatttcagaggagttgtatatgggctattcgagtatgaattaactgaaaaagatacttagaaacatgttcaaagtagaggaaataacatatgcaaagatgtggatgtgatagcatatgatatttttattactgtaaaaaagtaatttagtttttcctctttttcttaactctgttcttcagtctttctcagtgtctttgctcatctatgaagtagagacattaaccctaatgggttttttaatgattgtaagtgacatatataagatacaatgcttggtacatgttgggtgctcaattaattcaggtcattaatgaggcatctgcttaaaataaaccccaccaagggggaaaaaaaaaagtctggtattttattggttgttaaaaactgggtgttggttttctcttgaatacatatgtttatattatttataatctacatattgcttagatcctacagacaaatttgcctcacgattagtggtataggaaaaaatatattagatttacaaagcatttttcctctgaagaccaagggagaaggcaaaatttgtttgtttgtttgaaattaacaacaaacagtttttatgctgggaaagctttcatttattgcctgggaatggagccccttattgtgcttgtgtaataatttttgcttaggattctcttggcaatgtgggctcttttttggttccatatgaactttaaagtagttttttccagttgtgtgaagaaagtcattggtagcttgatggggatggtattgaatttataaattactttgggcagtgtggccattttcacagtattgattcttcctatccatgggcatggaatgttcttccatttgtttgtgtcctcttatttcgttggaaaaagtaactcattttctatttggtaattattttctaacaatttctggatattaagattcccaaaatcagtccgggcgcagtggctcatgcctgtaatcccagcactttgggagttgttaagttgaaagtagcccaatacctgcattctgactggtagagttcatgttaaccctttcatacattatttgttggtatgatactgaagtacaactataggcaagtggcagacctttaaaaaaagaggtgggaaagagattggggtaggctattattagtaatctttaagtcactggcagcatagatatggtatggaatagtaaaggtcatcacaagtcagtttatatttgggggtgtagctttacaagacagtagaataataaattaaaaccaggtggaaaattagatagatttttatttgtatgggtatggctgtattgtacgtaaaacatgtctctagttttcaggaatcttacgttagctagctactctaattgtattgctggattgtaagttcctcctagtacctctgactgtaaaggggaaattttaacttctctgaaacggtgtacctaagaggttgattgtcctttgtatattttcaaatgagaatctgtaaatccatctgtattctcttttatttccaactattaaaatgaaagatgaatattaaagaactattactttggagttttaactgtaattgaaagaggaagttaattataaagcactaggagaaagaaaagagacattgaatacacttttacaaaccaatttgtaattaggataggagaggtgatataccagcagatatgtgtggatgttgatgataaaacaccacgcaaacaaaattctaccttttttgtaacctcataagttaaaatcaattactatactttcagatactgaaaaaactagttttattgttttctttatggtttctgttgaaagtagctattaatgagcttatatgatgggcagaaatccagttagcctagaacaggattattagcttagaacagaatacacaatattgaatgcttgtgagttttatgtacttaggaattgatatcaaaatgggaatgaataggataacattgaaacagtttttaaattaataaaaccaaccatctttccagtatgtagaatgttaaataactcacagtaataggattccatataaaaagaatcattaactattatatccagaccactctgcagtacagttgggatttttatttttgcaaataacccatgttttatttataatacgtggaatttcctgagaataatttttgtggagcaagagttttgtctcaataccgttatgatattgcctgttaggtaattccttttgctgtctttagaatggaagcacaactaagtggaccctttaaatctaggtgttttgatgaatttgcttagtgtttaaatctttaaaatttgtaaaatatcagggacaaaagctcactcagtttcctcaagtaatgttatttatttttcttctttcttttttcttttttcttttttttttgagatggagttttgctctcgttgcccaggctggaatgcagtggtgtgatcttggctcactgcaacctccacctcccgggttcaagctattctcctgcctagcctcccgagtagctaggattacaggcatgctccagcacacctggctaattttgtatttttagtagagacagggtttctccatgttagtcaggctggtctcgaactcccgacctcaggtgatccgcctgcctcggcctcccaaagtactgggattacaggtgtgagctgctgcacccggccctgttgtttatttttttcttataataattgttacataaatttcgtcatgcaaacagttattttcaagataacctaatatctccagataacataaattctttactgtgcattatattatctgcataactcttttgacttaataattcttgcatcttacttttattatgcttactatacttcagatggcatttaagaagggaaatcatgaacatttaccttgaaaaagttgtgtgtgtgtgtatgtatgggcttagaataaagaagctatgaaaatacagtggtataacaaacttgtctcagtttcagtctaggaaactaaagtgctcattgtttttttcattcttcagaaaggaaagtatatgttcaaacgacacagtgctgaaaagcaatgattttttaaatctatgcttttagtgtaggtctgcttctattaatagactggagaatagattcgttgtattctcaggtacttcgtaaactgatactatgttttaaattccacatgatttatcttccaatagtttactgaagtggactttacccaaggtttttgtatactgtaccactggatggaattattgtttttcatatttcagcaagagatttgaatgaatattttttcttgatgaaggcactttgagataaaaaggagcaatttcaaactttttttgtttgttttttagaattaatagttcataacattgcagttttctactgtcttcctgtaataggatttgaaacatttcagtatattatttgaccaaatatttcttcttatttataaactattttatctaaaatgttattataaacgggattttaaacaaaacatgggcataaatatgtgtgccagtaaacacgttccttcaaactaacaaatactcatccagtactcttcttaatatcctcacattctccattgatggatttttgttttaatgactcttaaatagtagctttattattattattattgttattattttttttccaaggaattattgccaaaaaagtgagaattcacagtggaaagagacagtatctttcaaagaaccaagacattttttattaaaactgaaaaactgaccaattaaattgtgtaaactagtctttagtaaaatctttaaaaattgttttttgtatttagaatataaattttaatttgtggatgtggctctttgacttactttgcagttcaattcatctgttttgtcttttttttttttttttcatatagatgacagtcgaactgcaagccagttggatgaatttcaggaatgcttgtccaagtttactcgatataattcagtacgacctttagccacattgtcatatgctagtgatctctataatggttccagtatagtctctaggtaagtattggtcaaattactattttcttttgtaagaatgtctagaatctaattgaatttgagaagcacttataccattattattaaaagcgtgggttctgaagtagcctgccaattattagttctgtgattttaggcaagttcctgagcttctatatgccaaatttcttcgtctctaaagtggaataattgatagtatccttctcataaggttgtagcttgttttcttgtactatcattgtctagttttgatgacagtatgctcttctcataagtgcttccacctctgcattttctgtaagtttgtatagaattggtattatttcttccttaaatattttgtagaatttgccagtgaagcttccagaaaagaattttaactaccaattcaatttgcttaagagatttagggttaatcaggttatctatttcttcttgatttagcattataattagtttgtgtcttttaagacatttgtccgtctcatcagggctgttgaacttattggcgtacaattattcataatattgccttattattctcttaatatctttggattgtatgatgattttccctctttcatgcctgatagtggattttgtttcttcttacctttttcctgaagagtctagcttagaagattatcagttttattgatcttcccagagagccagctcttggttttactgataggctgtatttttttgttttctgttatcattaatctttgctcttaattatttttattcttctactttttgagggtttaatttgctcttatctgctaatttcttaagataaaaattgaggtcctttagttgataccttcttttctaatatagttattttgtgctacacatttccctctaagtactgtattagccacatcacaaaaaaaactgatgtgatacttttccattttaatatagttcaaagtactattttagctttctttttattttttaggaagtttgtttttttaaaattgacagataaaattgtgtttattgcatacagcgtgttttgaagtatatatcaaaataccttttaatttccattttgatttttctcttcgacccatgattactgaggctgttactagtttccagatattgggatttttccagttatctttctgttactgattttttttttttaagagacagggtctcattatgctgcctaggcgatcctcagactcctaggctcatgcagtcctcatgcctcagcttcccgagtagctgggactacaactgcacccagcttgctttatattatttttgtcattatttgaaatgtttaatgaaaatttatacaggaaaatggagagaatggactaattcctcacataaccatcacccacattcagcagtggttaagattttgctgtacgagttttatgtatcctcttcattttgattattttttgcttaagtattttattacttttttccatgttccctgaccacttttatttttttattatttttaataccttgaaccttttttttttaattatagattaaagggtacataagcaggtttgttacatgggtatattgcacgacactgaggcttggggtcctaacatttccgtcacccagacagtgagcataggtacacaacaagtgttttataagcccacgacccctgccctctcccacctccccatctagttgtccccggtatgtgttgttcccatgtttacattcatgtgtcttcagtgtttagctcccacttacaagtgagaatatacattatttggttttctgttcttgcattaattcacttaggataatggcctctagcttcactcatgttgctgcagaggacatggttttattattttttaaggctatgttgtattccatgtgccacattttctttatccagtccaccattgatggccaccaagattgattacatgtcttcgttactgtgaatagctctgcagtgaacataccagtgcatgtgtctttatggaagaacaacttactttcttttgtgcgtatacctactaatgggattgctgggtcaaatggtagttttgttgtaacttacatgacaaatctccaaactgctttccatagtggttgatctagtttgcattcctagcaacagcatgtaagcattcccttttcttcacagccttgccagtatctgttattttttgactttttaataattgccattctgctatgagatggtatctcatcctggttttgatttttatttctctgatgattagtgatgctgagtgttttttcatatgcttgttggcgacttgtatgtcttcttttgagaagtgtctgtgtcttctcattttttattggatttttttgtttttcacaggttgatttttttttaagtttcttgtagattttagagattaggcctttgtcagatgcatagtttgcaaatactttcacccattccctaggctgtctgtttactctgttggcaatttcttctgctatgcagaagctctttaatttaattaggtcccacttgtcaatttttgtttttttttttgcaattgcttttgaagacttagccataaattatttgccaaagcctgtgtcatgaaggatatttcctagctttccttctaggatttttatagtttgaggtcttagacttaagttttgattgatcttgagttattgtatatggtgaaaagtagtggtccagttttattcttctgcacatggctagctagttatccaagcaccattgattgaatagggagtcctttccccattgcttgtttttgttgattttgtcaaagatcagatggtgtaggtttacagctttatgcctgggttctgtattctattccattggtcttatgtctgtttttgtacctaccagtgccatactgttttggttattgtagcctgatagtataaattgaagttgggtagtgtgatgcctccaggtatgttcattttgcttaggactgctttggccattcaagctctttttttgttccatgtgaattttagaatagtttttttctaattctgtgaaaaatgacgttggtattttaaggataacattggatctgtaaattgctttgaacaatattgccattttagcaatatcgattcttccaaatcatgcttatggaaggattttccatttatttgtgtcatcttcgatttctttcagcagggctttgtgttctcattgtagagatttttcacctccttgcttagatgagttcctagttattttctttgtggctattgtaaataagattgtgttttttatttctttctcagctagaatgttattagtatatggaaatgctaccaagttttgtacatcgattttgtattctgaaactttgctgaatttgtctatcagttccaggagccttttggcagagtctttagggttttctgtgtatagaatcatactgtcagtgaagagagataatttgacttaatcttttcctatttggatgccatttatttcttactattgacagattgctctggttaggaccttcagtataatgttgaataggagtggtgaaagtgggcatccttgtcttgttttaattgtcaaagggaatggtttcagcttttgcccattcactattaagttggctgtgggtttgtcatagatgactcttactattttgggttatgttcttttgattcctagtctgttaagggttgttatcatgacgggatgttggattttatcaaagactttttctgcatctgttgagatgatcatatgttttttgttttttattctatttatgtggtaaatcacatttattgatttgcatattttgaatcaagccttgcattgcaggaataaagcatacttgattgtggcaaattaacttttgatgtgctcctggattcagcttacaagtattttgtaagctgaacaaatacagagtattttgtcgaggatttttgtatctgtgtttatgagggatatttgcccaaagttttcttttatcattgtgtctctgccagattttggtatcaggatgatgctggattcatagaataaattagggagaagcccctccttgattttttggaagtttcagcaggattggtatcaattctttgtacctctattagaacttgtctgtgaatcatctggtccagggctctttttggttggtagttttttgttttgttttgtttaaattactgattcaatttctgaacttgttactggtcagttcagattttcactttcttattgtttgaatcttgggaggttgtgtgtttccaagaatttatccatttcctctagattttctagtctgtgcatagagatgttcataataatctctgagaatcttttgtatttctgtggtattggttgtaacgtcatctttgtcatttctgattgcacttattttgatcttctctttttttttctttgttaatcttgttagtggtttatcagtcttgcttattcttttgaagaaccaactcttggtcttatttatcttttgtatggacttttgggtctcaatttcattcagctcttctctgattttagttttttcttctactagctttgggattagattgttctttttcttctagttcctctacatgtgatgtaaggtcattaatttgagatcttcctaacctcttgatgaaggcatttttagtgctataaattttcctctctacactgctttagctgcatccaaagattttggtaaattgtatctctattttcattaatttcaaagaattttgttattcctgccttaatttctttgttcatccaagagttattcagaagcaaattgtttaattttaatgtttttgtgtagttttgagagatcttcttgatattgatttctatgtttattcactgtggtccaagagttatgcttggtgtgattatgatttttttttaatttattgagacttgctttatggccaagcatgtggtctatcttaaaacatgttccatgtacagatgaggagtttgtatattctgtggttgttgggtgtagtactctgtgtcaatgtgtatccagttggtcaagtgtagagtttaagtccagaatttcgttagtgttctgcctccatgatctgtctaatggtgtgagtggggtattgaagtcccctactattttttttttttttttttttgagatggagttttgcgcttgttacccaggctggagtgcaatggcatgatcttggctcactgcaacctccacctcccaggttcaagcgattttcctgcctcagcctcttcagtagctgggattacaggtgcccaccaccatgcctggctaatttttgtatttttagtagagactaggtttcattatgttggccaggctggtctcgaactcctgacctcttgatccacctgcctcggcctcccaaactactggtattacaggcatgagccaccgcacccagcctgaggtcccccactattattgtgtggctaagtcttcttgtaagccgagaataacttgttttatgaatctgggtgctccagtgttgggtgtgtatatgcttaagtattttaaagcaaatctcagaaacttatctgcatctcttaaaatggacattgttaaaccacagggctgtatcacatctaagcaaattaacagtaattccttggtataatcaaattgctactttgtgttcaaatctcttagaacgaataaccctaaaaagatgttttttgaggcatatcgggaatttggtaagttttaacgtgtcaaatattgctaaaacttaacatgcttttcatttacaggactaagatttgaatttattatgtatatgaagatcttaaaatttaagccattagctaaagaaactattggaggagatcttttattgtattctgtcagctgtttaactcagtaatgagtaagacaaaaatcatacattcctttatttttctgtatgttggcacttgactgagtaaaatttgaaaatgcagcagattatggggtgcattttattacataatttaattaacaaaaaatcattgataacgtagtgcaggctaggccagactaggcatatagtcatgaacaggccagacgtgttacttggattcaggagagctcacaatcttattttagggcccttatagataagaaataaaagaatagtttatgaaacagtttactttggagcaacatattagcattcttacttaaattcttaactatgttaagaatgtatactatgcttttaaggacttcagaaatgtagattgaatgtgaaatggcaaaaataagtatcaaagtttatttataatattgacctgatatgtatgcacttacctgtagttatgtgactatacaaagagtaataatctttttttttttttttcattcctgaaagccattttagcttgattttggggaagagatggtttcattattgcttttttaaagcttgatttaatgtagtgttgaattttttacaattgctaataaaccctaatcatactgacatttatgtgaaaacattgtgcattctgaggcagaaatacattcttaggaagacctaaacaagatcttagtttggaaatacttacaaattgtggttagattaaaacatttagactaatataagaaatttttaagatacctctggttgggccgtcttgcatgctacattcgttttttttctattaattacaccaaattaatgttttttaaagaaaaaattccaattttaaagtttcttaggcatgagagatgaagactagcaagaaaggatgatatggccaaagaaatgaaggtgtgaaaaactctcacagctctgttgattttttgcttttcttactttcttatattcaaacacatcattgataataaatttacttcaacgccttctaattcctcccaaaaaaggaaatttaattaatttctttcagaaagaggaataaagaggccaggtgaggtggctcacacctgtaatcccagcactttgcggggccgaggcaggcagatcacttgaggccaggagttccagaccagcctggccagcatggtgaatctccatctctactaaaaatacaaaaattagccaggcatggtggcgtatgcctgtaatcccagctacttgggatgctgagacaggagaatagcttgaacctaaggggcagaggttgcagtgagctgagatcactgcactgggcaacagaatgagactctgtctcaaacaaagaggcctaaacaagtatttgagaaggcagataatgttgaatttggtgcattattttgttactttgtagaagagataattattcttactgtaaaattgcatgacataatgttggtcacttactgcagtgataatctgagagaaaaggccgaaccagaaacgtatttttcttcctttgcttatttggagttaagaccatacccttcagtccacaaggtggcagcatttgtttactttgacagtatctcgactattaaacaatagacaaggtacggaattggtgacatacagtgaagttcactctcataagtagaagatggtcctaggttagcaatggcaaggaacaggaaagaagacagttaattgcattctttttacacacagcaataatagcatattttgcattttttattctattaggtgttcagtgtccaccagagagaaatagtttgaaactgtatagtttaaacttaatatacttagtagtgatggttgtcttttgaattccgagtttgaattttgtacaactagattgttatggtaaaaattgttaaacattctacctctagagagtttttcaatatttttacttatgtttgttcaaactgttggaatggagttgtatcaagcattagtaaattcctaagaagaaaatagttatctatggtggcattcattgatgctagaatagtctctgtactggtaatgtggagtgtgttacctactcatttttagacaacatcataaatattttacatcaattccctaattcatttaatccttgtatcaaccctgggtagcaagatattgctattaacctcattttacagatgaaaaaaactgagatagaaattttgtaacttgtccaagataaacctaatgccaataatagacagaactgagatttggatacaggcgtacctgaattctagtgctcttctattcacttaaggatttattgaaactttgtaaagtttcagaaaacacttttcctttgagacacccagaagaaaaagaggaattaattcttttgaggttctgacactgtgtatccctattcctataaggaggtcaaaataatgaatattttttatactaatttttgacgtataattctgcaccttagatgtcactttaccatagtttgaaactattcaaattaaactttatgtttctatgatagttacaaggatcatttttgctaagtttcaatttataattgcagcaaatgtggatccagattgagggtaacttttaatatgttccttattgtagagtgcttgtgagctttaaatttatacttaaaaagacatctctagataattattgacttgttttctaaggaatggatatgatttttaagactgccaatgtactttccctttttgtcagaaggtatttccattattgtcttaagcgttattgaccatctggggttggttgagaaatgagatgaatgggagtgcagagggagggatttccttcccaaattttgcctgggatcagtcttttaaagcagttatttttaaagctgtgttttaggctgagagattcatctaggcaggggccttacctgtcttatttcttgcatattcctatgtctgtaaatatttgttaaatgaatgcatgaatgaatgaaaatttgttttacctgctgggagaggatccagagtaagtaggactctagcatttgtccatatatgtccacatatttgcttgttgaaaaatattcctttgaagaaataatccttaggctataaaagaagtttgtgaattaccaatgacatgtgacagaaatataaattcatgttaacaacttaaaaaggaatgcaagattgtcagcaagtgttggtgagttttctacttctatggtaattcaaaacatacatgattcaaaataaaggttaaaaaggaaacacaaacaatctaagcttaaactttgaaagtcactacatgtattcccaccctcataacttctaccctaaaattttcttcttctaatctcgacttggttttcctgtttattttcccttgcctttattagaggcttgtcagtagtacagagtgaagccataagctgaaataattttacacatatccacaaaacaagcattaattaggttagcatttaaaattttagtagacttgtgaaggtttgtcacaaaccagtgtttggtatccaagaaataaaagtagaacttacgtctagaagccacattttaaggttaatataaggaagatctttgtagtcagcagtgtgctgaggtagaataaccttcctcaggaggcagttgccatacattcttaagactttttaaaaccaaattctagccattttatttagaaaatctttctgtgatcctaagatcagttatatattcacgtatatttgtctagaatatttttatgcttaatttttttcaaaatcatacctattcatgtcaaacagtttaagtgctgagagtgtaagagtgatgtacatggtagtgaggacacagacggttaagcgagtatactaggctgttctcgccttgctataaagaaatacccgagactgggtaatttataaagagaagaggtttaattggtttacggttctgcaggctttgcaggaaacatggtgctggcatctgctcagtttctagggaggcctcatcatcatggtggaaggtgaagtgggagcaggcaagtcacatagctaaaggaggggcaagtgagagagagtgaggggggaggtaccacacatttttaaaatgaccagatcttgcgagaattcactatcatgaagatagcaccaagccatgagggattcatctccatgattcagtcacctcccatcaggccctacctccagcattatggattacaagttcaatatgagatttgggcaggtacaaatatccaaactctgtcagtcaatatctagaataaagtgttttaagtgctttgaaagtatttacagtgtacagtatggagaagaattggacagaagcaggagtggttgcacatgggagctcatgcccataataccattgctttgagaggcagagacaggaggattgcttgaggccaagagttcaaaaccagcctgggaagcatagcaagacctcatttctacaaaaataaaaaaatcaaaaattagccaggcctgtggtgtgcacctgtagtcctaatgaggagggtgaggtggaaggatctcttgagcccaggagctcaaggttacagtgagctatgatggcactactacactccagtctggatgacagaggtttttttgttttattttttttgaaatggagtcttgctctgttgctcaggctggagtgcagtggtgcggtcttggctcactgcaacctctgccttctgagttcaagtgattctcctgcctcagcctcccgagtggctgggattacaggcaagtgccaccacagccagctgatttttgtatttttagtagagacggggtttcgccatgttggccaggctggtctcgaactcctgacctcagggatccacccacctcggcctcccaaagtgctgggattacaggtgttagccaccgtgcctggctggcagagtttttaatttaaaaaaaaaagttaaaaaaaaaaaaaaaaggcagcacaagtggcaatagggagatacagtatgtaggttctgggaggtctgtggggcaaggcagaagaagtatttaagaatgtataagaactagggtagccagaacttcgtgattgatttgatgttgaccttgaagcagagggaaataacttctaaggttttggttggagcagctgggcagggaaaatatgggtatcatttacagagatggggatactggaggaggagcttgttcaagtagcaacagggttcgtgggggatatctaacatttgacataaattttctggttatacagagatgaggtgagggctgtgaatttggaaacttttgcagctagtaattgacaccatagttgtagatatatagaacactgactaacatttgaagacttggtagctacagaggaactagtaaagcacactgagaaaattggaaaggaggatgagagagtgtattgccatgcaatccaaaggggaaaggagataatctgttggattagatcatgagatcttacagatgggattggatctgaagcaaagtaagactttttgccttaattagaagggaggctgctgccttctgggtaatataaggaaacaagaagagagtggatgcagaggcaggtacttttttagatttgctggcaaggtgtcaaagggtccttaaagagcttatgcagtaagtaagtgagggagaaccctctggggatggtggtcagggagaagtgttcacatctttggcaagaatacttcttcatctttgtacttctagcactggatagtttacttgatacctagtgggtattcctgtttacctgatatacctgaggaatactcgattggaggataaataacttaaattcaaggtagaaaataaatagtaaatgcttgtggcaagtcaataaaatactgtgggagtagactaaagagagagttctcttgaggtgatggcttctagtttcctggacacatttgaaatgctgctttaaagttttctttaatgaattcctaagattattctttctgtgcttgattttaaagataggatgctgcactaacatatttacttttattgcttcattatgtccaaaaccacgtattactgtattacatataatttcttttcttcttttcttttttttttctcttgagatgaggtctcaccctgttgctcaggctggagtgcagtcgtgcaatcctgatttactacagccttgacctcctaggctcaagtgatcctcccacctcagcccctgtggctaggactacaagcacgtgccaccacgcctggctaatttttgtatttttttgtggagacaggatctcaccatgttgccgaggccagtctcaaacttccagcccccattgatccacctgccttggcctcccaaagtatggggattacagttttgtaattccttgcagaagtttgtggtggaggtagtacttgttaaaggctgggctgttgttgtacttagcaagtttaaagggaaggcattttgcatttcctctggataaaacgtggaagaaaaataagagaatgtaattattcacatatattcaattatatagactacttctagagaagtcctttgtaaatctttagagtgcaactagtaatttaaaacaggagttagaaggattggtttgaatgaataaagttcattcattcaaggtttcatgtggtttggaaaaaaatgtgcttttatctcttagttatctagcttaactggaaataggctcaattaatcatatttaaataagatgaaatgagacctttgaaatttttctgtgttttatatggcatgttgtaaatactacgtaaatgttagtcgttcttaccctttcagacttactaacctgtttttaggacagtgcctcataatcatctggagatcttgttgaaacacagattgatgggctccactctcagagtttctaatcctgtagtctgtgctatgtgtaagaatttgcatttctagcaatttccaggtttatagtgatgctgctggtctgcaaccacactttgagaaccattgtcttaggttaagagctttaaaaagaaaggagggagggaagaaaggaagaaagcaggcagggagagaaggaagaaggaaggggaaggaaggaagacatttctaataagaaatatttatatttttaattctttagggaaagatcataattactttttgatagactttattttatggagcagttttaggttcacagtacagagatttcccatatacctcctgtacccgcacatgcatagcatcacccattaccaacattccccaccagagtggtacattttgaaatgggaaaagttcccttgtcccccttgcagggtgtgcgatgggggtgtggcttgtttctttggtgccctgctgctcagaggagttgtgaccctatggggaggggacagacaggcagatcgtgggagcgtgggctctgaccccacagcagtgtctgggggtaaacgtttacagctcctgaagccccagtgggcatgtgttatagaatgctgttttggttttgccatctgtaggtggcttgtgttagtcaactcagaccctctgccttatcacaaggtcagagagctttctgtatcctggggttcttgtcttggtgtaccagaaaaattggatctcacatgggcttggagaatgagtgcaagcttttgtattgagtggtggtagctgttagggaggttgatggagaggccagaaggaggatagagtgggaaagtgggtttcccctggagtcgggccgctcagtggccaggctctcttccaaccgtcccagccaaattctgcatcctcctgctggttgatggcctgccggtgtctgctggtgcctgtcagtgtgctcttgtaccgatgtgttcctctgcacatccagttgctgtgtctctgcccactagggtgtcggagtttttataggtgcaggatgggggcgcggtgggccagagtggtcttggaaaatgcaacatttgagcacaaaaacagaaatgcttgtcctcaccttagtccgtgggcacaggcctggggttggagtcctcaccagggacccagaccttctcctcccagcacttcactgcccctctcccatatcagtttgttacaatttgtacctacattgacacattattatcacccaaagtctacatgagggggtcactcttagtattgtatattctatgggtttggactaatatatggcatatatctaccattataatatcatactttttataatttcttatatttatactttgtgaatcaatgaaaatagagttaaaaaccatttagtttctagagcttcttgcccaataagttgtcatatgagtgggttgcatgtgtaccaggatacttattccatctgtccctgggaaagttggataggggctaggtctggaaaacagctggtaaccaactgttccaagggcggaggggatcaatcacatgtaacttacttgtcttagtgctgaacattaatagagaaactctagtttagagaccagaacaaaggaaatatctttgtttttctcaaaaaaagctgttctagttatcattttttggtgaaggaatttcatagtgaaatttgagattgaattcattaatgtttaaaataactgatatttcatcttggtgattgacctgcagagctggtctttaaaaggaaacatactcttactctgctggagaaccatctcaccttgacgtaaaagtcagcagccactgggctgccagtaaataacacaaacattttgtaggattgagagggaagttttggactttaaaaaatttgatctcctcatttattcttttttacgctttttacaattaggataaaatgggcaaagtctttgcccattttatcactggaaggagtttagtaggagttcactttactatttaggagaggaaaagcttttctgtaccctctcaggttcagtggctgggcctgtggaataagttgacaacaaattgacaggagaaaaggcacaaacacttatttgatgttgaaagttttacatgacatggggcatgggggctgaagaggtgagggaggttcataaaagaagggagaaccccaaagaaatggctaggcttagaggcttttatatcatttgaacaaagggcaataaagagaagtaacaagagaaaggaaagggactttgagcttctagggtcaacacatatatggggaaactgatggtagatatgggcttcttagtcttgaaagacttatgtagattcttttttggtgccatctcatcttgtgataaaatcattatcccccggccaggtgcggtggctcatgcctgtaatcccagaactttgggaggccgaggcaggtgtttgaggtcaggagtttgaggtcaccaggtcaggagttttgagatcggcctggccagcatgatgaaacctcatctctactaaaaatacaaaaattagccaagcatggtggtgcgcacctgtaatcccagctactcaggaggctcaggcaggagaattgcttgaacccagggggtggaggttgcagtgagccaagattgcgccactgcactccaacctaggcaacggagcaagactccgtctgaaaaaaaaaaaaaaaaaaaaatcattatccccttcctggtacaggaagtggagtgggggaaacactttcccaaaaggagtttatgttctgctttcaggcaaataggggaggacagaaagctcatcctatgtttactctttttccattgtcctcagctcaaaagaatttttatggcagagtgacatattttggggtggcaagttttgatcccttacaactgcaacttacaaataactgatgtcattatatgtaaaacttaatctggtgacaagtgttttataacataaatatttgacaaagagagcttcaattcaccgtttgtcctaggtatgataacttccccatatattgcttccatcagacatttttagacatttaaaacttcttagtaagataggacattactgtaagagcatttgtctgcatatactatttcagtttttttcccctttgtctgagttaatttctctatctactgttcacagtaaagagttccataacatactaacacttgacctaaacagattttaacctctggcagtctcatctgactgaaacacagtaagtaaggcttacataaaataaaaaggcactggaataaaatgaatgccattaaattaatgactaaaactcatattagtttattgggttatttcagggctattgacttacgtacaacttctataatcttagttatatggtttgtgtctctctaaattataaaggggagagtaattgcaataggtaggttaaacggcaacagcaagaagtggtagctactacaagcttgaaaaagggaaggaggccaggcatggtggctcacgcttaaaatcctaagctttaggaggctgaggcaggcagattgcttgagcccaggagctcgagaccagtctgggcaacatggtgaaactccatctctacaaaaaatgcaaaaattggctgggcccaggaggctgaggcaggggcatcgattgagtctgggaggtcgaggctgcagtgagccatgatcacaccagtgaaccccagcctgggcgacagagcaagacaccatctcaaaaaaaaagaaagaaaacggggaaagaaaccgtaacactgcggatggagctcaaaaagtaaagctgcttatattaatttcatatgaggtcaaatggttttagatattttaatacaccctgagatcattgaggtgtattagagtgtggtaactaatgttgatagggctattcacattactgtgttcagtgtattcatatgaaggtagtaaagaatgtattacatttgacaaattatactcagggattcaaaagttggttccagaatttactgaactaatatttttgagcatatattgtcttagagcagtatatacatatgtcctggaaatgctagtgtgtccattagcctttaaaaataatattaaaaatatatatccttatttatgtaaatgaaatatgacaaattttttggcaatttttcagttttttggaattgtaagttttcaaactttacattgggtttgtttttatgcaaggaaggtcattttgattgagaaaagtaagagcttttttaaaatcagcaaactatggaccatgggccaaatttgacccattacctagttttgaaagatccgtcaggtacagatggtttttatacttttaattggttaaaaaagatttgtttaggctctaaggatgtactgctacacttgattaaacttctgtcatattttcagacatcaaagtgtgtctgtgaaagaaagtggcttttgtcggattttctgatctatttgtgatgagtggctattttatgttttatcattacttacttaacagtaataacctgtcacttggcctgtcatatagtagacaatccatcattggtttaacgagagctacaggttttatttacataataacaagttctggtatgtatagcagaaagtttcctatttgtgtatttttacaattatttatcaaacagagccccccaaaaatgccctgaaataagacaaaagctaacctatgtttaggcaacttagctatatcatactaacattgaaacagggctgtttttctaccactaatgatgtttggttgtgttcacattctctcctcttcttctcttctccccatccacatcaataggtgattttgtggataacttgtggagttataaaacttgatgctttgatctgtgcttgagagagattaatttgcaggatgttttacataatttaagaaatataaaatcacaagttggatagtttttaaaatcacctttactgaagtataatttatatacaataaagcataaagtttgaattttgatagttgtgttaatgacagtcaaaacataaaacattttcgggccaggcgcggtggctcatgcctgtaatcccagcactttgggaggccgaggcgggtggatcatgaggtcaggagatcgagaccatcctggctaacaaggtgaaaccccgtctctactaaaaatacaaaaaaattagccaggcgcggtggcgggcgcctgtagtcccagctactcgggaggctgaggcaggagaatggcgtgaacccaggaagcggagcttgcagtgagccgagattgcgccactgcagtccgcagtccggcctgggcgacagagcgagactccgtctcaaaaaaaaaaaaaaaaaaaaaaacattttcaaaaattttctcttccaccacttgcagttaattccacccctccttcaaactcctgccacaggcaactatttatctgctttctgtcactatacaataattcaaccatttaaaaatttcttataagtggaaccatacagtatatgttcttttgtgtctagcttatttcgcccagcttgtttttgagattcattgatgttgctgcccatattagtaatttatttacttattgagtagtattttattgtctaaatattctacagtttattcatttgaataattgtacagtttatttatttgaataaacttgtctgggttttagtttgttactattatgaataaagtaatgagtattcatatacaagtcattttggatattaatgtttatatttatttctttgggtgaatacctgaaattggaattgctgtgctgtatggttaggatgtgtttaacattttaagaagctgccaaaatgatttttaaagtggttggattgttttaccactttaatcagcagtttaaaaaattccagttctaaatcctcagcaattcttagcattgttattttttttaaatatcaggcattttattaatgggtatgtaatggcattttctcattgtttttctatgcttttcccttatcactagtggtgtttaatgcacttattaactatttgtatatcttttgtgaattgtctattcaaatcttttggccagtatttaaaaattcaggtctttcttggccgggctcagtggctcatgcctgtaatcccagcacattgggagactgaggcgggcagatcacaaggtcaggagatcgagaccatcctggctaacatggtgaaaccccatctctactaaaaacacaaaaaaaattatccaggcgtgctggcgggcgcctgtagtcccagctactcgggaggctgaggcaggagaatgacgtgaacctggaaaggcagagattgcagtgagcccagattgcaccactgcactccagcctgggcgatagagtgagatgccgtctccaaaaacaataataataataatcaggtctttctcttgtttagtgatgagaattccttttatattatggatataagttctttgtcagatacatgtgttatcagaattttcttccttgcctgtggctcatctttgtattttcttaatagtgtctttcaaggaacatgagtgatacttaattttgatgaattccagttcatccatttttaaaatttttctatcctgtagaaatgtttctgccccgaagatttttcttctatattttcttctatcattgtaataactttagcttttacttacaggcttataatctatttcaagttattttttatttagattgtgaggtaatggtttagtttcattttttctttttctttttcttttttttattttgagacggagtttcactcttgctgcccaggctggagttcaatggcgtgatcacggctgactgcaacctctgcctccggggttcaagtgattctcctgcctcagccacctgagtagctgggattacaggcgcacgccaccatgcctagtgaattttgtatttttagtagagataaggtgtttccatgttggtcaggctgatctcgaactcctgacctcaggtgatctgcccacctcggcctcccaagtgctgggattacaggcgtgagccaccatgcctagccgaggttcagttttttcctgccagtatagagatacccacttgttcctagcatcatttgatcaaaagataaccttttcctgttggcatctttgtttaaaatgaattgactgtatatatgtgagtctacttaactgtctgttctgttgtattgatctgtatgtctctttgtttaaaatgaattgactgtatatatgtgagtctacttaactgtctgttctgttgtattgatctgtatgtctcctcttaggccagtaccatactgtcatgattactgtagttttataacaaggcttgaaattaggtaatataagttctccgtctttgttactcttttcaaaagttatactggctagtataagtcccttacatttccatgtacattttagaacaggagctcttcttttttttcttgctgcaatggtttgaagggatttatctggtaaaactcacattttttaaaatatttttcttcagtgttttttactacttatttttataagaaacacaaaatgggtttctgattttttaagtctgctgtgttaactgatattttggggacacatttttaaatatacatgatgaaatattcttctaaactgtaaatttttgctccacgttagtccttggtaggattaaatggtttctttatatcatagttttaaggtttcctgatgaaacatcacagcagtgacattactgatttaatattgtgatcctattggttgctttgtaaatactaccagagaacacagaactgagaaattagatgtattttattttgcagtttcaaaagttaagaattgaaattttagcttcatatgattctctgttgagtctctgttgtacttttactaaacacacatttcaaagtgtttactaaaaacattttaaagaggacaaaatgtcgtagtaactttggggacaaaaatatattttctttttcagctcttgttattttctctactagatgttgttctgaatgaacaaaagttgatattaagtatattgattttaaagggcatctttaagtgctttaaggagaaagacattttatcacaaaataaacacttgatattcacaaaagtttttcagaatatagtctatcaggtagtgtatttatttgttttagctattcaatgatagccagagggaataagaaagtaaatttttttaaagtagttgttttaaagcaagatcttgaggttttatggaattcaaacaaaatgagccacctaataaaaataatagaataaaaatatgcatagactttaaaatgtggcttcaatttagtgcctatggaataaagtctgtccattaattcagaataaggtcagcaattatctagcaggttgctattaaaaaaacagtttaaggtcagcaaactaatacctgcgagtcaaatttcaactcattgcttgactttgtaacaactaagaatattttttacatttgcaaaggttgaaaaaaaatacaaaggataatactttgtgacatgtgaaaattcagattctagtgttcataaatgaagttttgttggaaccactgacgctgttctgacataaaattaatagatatcaatggctcacacctgtaatcctagcactttgggaggctgaggcaggtggatcacgaggtcaggagttcgagaccggcctgactaacatggtgaaaccccgtctctactaaaaatacaaaaataagccaggtgtggtggtgtgcacctataatctcagctactcaggaggctgaggcaggagaatcacttgaacccaggaggcagaggttgcagtgagctgagatcacaccatcacagtccagcctgggcaacagagtgagactctgtctcaaaaaaaaaagaaagaaaaaagattttgcaaactccctaactacaaatttttaaaaaattatagtgtcttaattctaatataaaggagaaataaaaggaaaataagatgattttaatttgtaaatacttacctattctgtatggttaaaataaggagatggtcaaataataatttaatgactcacttgttttattgccatacaaagataatttttttcttaggttcacaatgcttaagagggagagaataatgtgaacaagtttcatacagaatacacttgatagatgaattacattaaccacatagtgagtgagctccaaaattattaaagtctggttgctcaattaggatggaagcagggctctgtggaaagtaaagtttaattaaacattaaagtgtgcttttgtgtgagcacagctgagatctgcaaccacctgtaaggtcccttgaagttagagggcagtgctggtgttacaaagcaaggcttcaaagctccaatccatgtcacagtctgagcattcagtcttctgagaagtggctgacagagtgaaacttgacacagcctaagctctcaaagtgttgtcaagctcttaggtttatatatgtttgaagtccagtagttgaagtcagtaactcacatatgggatctgaggaggcgtgttaccacattccagaggggaggagaagtttcaggttcatatatgggatctgataagaggtcacattcttttttttttttttttttattgatcattcttgggtgtttctcgcagagggggatttggcagggtcataggacaatagtggagggaaggtcagcagataaacaagtgaacaaaggtctctggttttcctaggcagaggaccctgcggccttccgcagtgtttttgtccctgggtacttgagattagggagtggtgatgactcttaatgagcatgctgccttcaatcatctgtttaacaaagcacatcttgcaccgcccttaatccatttaaccctgagtggacacagcacatgtttcagagagcacagggttgggggtaaggtcacagatcaacaggataagaatttttcttagtacagagcaaaatgaaaagtctcccatgtctacttctttctacacagacacagcaaccatccgatttctcaatcttttccccacctttcccccttttctattccacaaaaccgccattgtcatcatggcccgttctcaatgagctgttgggtacacctcccagacggggtggtggccgggcagaggggctcctcacttcccagaaggggcggctgggcaggggctgaccccccccctccctaccgggcggggcggctggccgggcgggggctgaccccccccccaccccacctccctcccgacggggtggctggccgggcgggggctgacctccccacctccctcccggccggggcggctgccgggcggagggcctcctcacttctcagacggggcggctgccgggcggaggggctcctcacctctcagacggggcggccaggcagagacgctcctcatatcccagaaggggcggcggggcagaggtgctccccacatctcagaggatgggcggccgggcagagacgctcctcacttcctagatgggatggcggcggggaagaggcgctccttacttcccagactgggcagccaggcagaggggctcctcacatcccagacgatgggcggccaggcagagacgctcctcacttcccagatggggtggcagccgggcagaggctgcaatctcggcactttgggaggccaaggcaggctgctgggaggtggaggttgtagcgagccgagatcacgccactgcactccagcctgggcaccattgagcactgagtgaacgagactccgtctgcaatcccggcacctcgggaggccgaggctggcggatcactcgcggttaggagctggagaccagcccggccaacacagcgaaaccccgtctccaccaaaaaaatacgaaaaccaatcaggcgtggcggcgcgcgcctgcaatcgcaggcactcggcaggctgaggcaggagaatcaggcaggggggttgcagtgagccgagatggcagcagtacagttcagcttccgctcggcatcagagggagatcgtggaaagagagggagagggaatccgtggggagagggagagggagagggagaggtcacattcttgaagtggggagggaatacactcttaagttcttattatagcaaagcatatcactcatgtagcaaactatataaatgtttagaatcatttcggagctacatagcaggtatacctgcattagacaatataatggataataagattcttacacctacttataattagtaagtttggaatgttcagcaaatattggaaacgcaggggtagtttgtctttctatgtaaaatggatttcatttctatgctcagttaattataggattttcatttgcataaggatgagaagtataaatatttttggaggtataacgtagattgtgagacagtgaatatgatgagtaggattggaagagtaagggcaaaaataactttatcctttgctcagagtagaaacttagtagatacattgaatcctttatttctttctgtagtaattaataaagtgtttgtagtcactagacagaaatactacaattcccatttaggagaataacacagaaaacaaaagaaagaaatcagatggtcaaatactttaattaaaaatgtgattgaaacaatatatatcacaaaataagatgacagatacaaaagtaaacgtgattgataaatttaaataggctaaacttcctggcaataagaaaatatttttatagtagattataacataaaccacaaatcagtgcttgtatagacgagttctgaaaacttcaaactgtgaaagttgaaagtaaggtttaattcaggctagaaagcattagatcaatctctctttgtcttacacacacacacacacgccccattataatgatcaaagttcagtctgcactgaagtttaagtctaattgtaagtatctttatatattaaaaaatccctgtgttaactgtaagacaaaataaacacatttagtggtatgagactttaaattaaatcagatcttagtccatgacagattaagtgcacaaaaaataaatgttaataaaactgtagaagccctaaataacataattaacaaactagaacacatatacaaacatttataaagaatataccttcttttaaattgtccatggaacatcagaaaatgtaaagaatctagatcatataccaaatctcaaattacagaaaataaaaattaacattttctgatcacaacacagtaagatcaaacatttattacaaacttagaaaacaggaaaaatataccacacggaaatttaatagcttttttggcaacgctgggatcaaaatggaaatcaaaccagtatgatgaaatttctgtgtatcagaacttatgggacatagctaaaagtgcccagaataaaactccttactctaaaggaattaacctactcaaaaaggaattaactgaaaaagtaatgataaataagatgatataaaacaatttaattaaacaaccaagcaaagaaattagagaaagaacaaagtaaacctaaataaaatagaaggaaattaaataaatataaaaataagaatacattatgaaaaaacaattactaaatcaattcatgagcttttaaaaacaaaagatgaaaattgttagtcaacctaatcaggtaaacctggaagaaattactagatgtttggcaggggattcagaaactcaattttggacgggttaactatgcctatcaggttaaaattggagctgtcaactagacatgaggcagtagtgtagagagaggtctggtttgggagacaaacacttgatagtcatcagtgtactatatagattgaaagtcatgagactatatgagatcaccaaagaaatccaggaagataaaaagatggtgaggtacaagagcttagcttagctctgagatgcttttgttttgttttgtttattttttgagatggagtttcacttttgttgcccaggctggagttcagtggtgcgatctcggcttactgcaacctcctcttcccgggtttaagcgattctcctgcctcagcctcctgagtagctgggattacaggtgcctgccaccatgcacagctaattttttgtatttttggtagaggctggatttcatcgtgttggccaggctggtctcaaagtcctgacctcaggttatccacctgtctcggcctcccgaagtgatgggattacaggcttgagccactgcacccagcctgggatgctttattatcaaagtgaagatgaggaggaatgaccaaagtagactgtgatggagttgtcagtaaggtaggagaaaaatcactctattgtggaagagagagtgatcatcaatgtcagctattgttgatatttaaggaaggtcagaattcggagttgactgctctgtttagcaacttagaggtcattattgaccttcatacagcattttcagaggtggaggtaaaagcttgattccagtgagttaaagagaacgagaggagaggttatggaaaacttttttttgtaaagttatggtattaggaaagcaataggatagtagctaaaatagatataggaatataagaggtattttgttttgttttttacttgaaaaggaagaaaaacatggaagccttatggaaaagatccaggatagatggaaaaattgattgatacaggagagaggagggaaatttaggaaacaatccttgagtaggtaagcaaggatgggacttaccgcacaagtataaatgttggttacatctaggagcacatcgttcggaatgacaagaaagaccacagaatatatcaaaatatgttggtataaatactgataagtggaggatgtggttagtgggagcctttggaaagtatatctccttgttctttttatatttttcagtaaacttaaaaacagagtaatttggccgggtgcagtgggtcattcctgtaatcccagcactttgggaggctgagacggacagatcacctgaggtcaggagtttgaaaccagtctggccaacatggtgaaaccctgtctctactaaaaatacaaaaattagctgggcatggtggtgcacgcctgtaatcccagctacttgggaggctgaggcaggagaatcagtttgaacctgggaggcggaggttgcagtgagccgagatcatgcccactgcaccccagcctgggtgacagagtgaggcaccatctcaaaaaaaaaaaaaaaagaataatttgctgagagtgattatgaaggtatgggaaatttgtgaagagtaagagaaattatttaacttctttcaagagtgagtggatgagggtagtttcctgtgaagttagtgttaagtgcctccttaaggatcactataccttaaggatagtgatcatgaatttaaaatgagaccagagaacatggttgcatgttttttctctaaccatattcaagtctgccagttcaaatgtagagtgagtagagaaatttaactagggttagttttgccagggaggtaaagtacaaaaaataagagaatgaaaatggtaacagagtgcaaagttgtgtgagggagttatatttactggccatgtaatttatgttgggaaagaagaaagtaaatacataacagagtgaggagcagtgggtgtaggttccatagatttttagatcacaatggccttgaaggattgttggagacaaggaatcaactggaaagaatggaagtagttgtcagaaagtgttatgtcataaggtgaaggagggagtgaagttattggtaatgaaaaagtgtttagggtgtggtcatggttgtgtgaagtggaagtgggcagaataaaagatctttggagaagaggaagtcaagaaaactgatagaccaggatattaatcatctatatatagttattaaaataattaacaattaggcaaggaataatttttaagaaaatgacagtgagctgaaagttagaatttccaagaactcgtgggttggtagaggagcatcaaggacacatattgggtggtatatgttacaggagattttgagctgggaggtttcagggagaagagagaaaaatgacgaagaagctatgtatagtaagcacactgaatttacttccaggcctatttgaacatggaatgtgggaagactttgaggaagcagtatattcaggggagagctgggtttcacttagaatgagaaagcaaggggagcatttagggaagaaattgcaattattaatggcttatctgggtggagagagatttagcttttacttaatagaaaagtgcacatattttttgacctagcacttcatattctaggtgtatttaagagtactcttgcttatgtgtcaattgacacatatagaaggggttttttttttccccagcattgtttaacagtgaaagactagaagtgaaatgttcctggttaaataatttgatacatccaggcaatgtaaatctgtgcaaccattggagacaaaaatgaggttgctctcatatgtgctgatatgaaatgatggtcaaaatactatggcatgagggggagaaaagcaagtgcaaatcagtatatatgatgtcatctcatatgtttaattgaaaaaaaccaaatacgtgtatgcgtgtttatgcataggaaactagtaagatgcacaagttgaaattattggttgcctacagagagggcaattgggtacttatttggcaagagtgggagggaggcttgctttttttctgtatactttttgaaccattgcctacataaatttttttaatgaaatatgttctaagaaaacactcaagccacattttgaaggatcttcagtaatagttggagtctgaattttacatagtagtaaatggggagaattatatgaatagagctgtgtgtttggaaatttatcctaattcagtctttaaaatcgattggaagagggaaatttcaggagtaggagtcttgataaggaggctgtttcagtagcccaggcccaatatatacttctgtgaatttctcaaatacagtcctgcattgcttaacgatggaaatacattctgaaaaatgtgtcattaggcaatttttgttgtgcaaacatcatggagtgtacttagacatgtaggtgatatagtatagcctcttgctcctagactgcaaacctacatagcgtgttactgtactgaatgctgtaggtagctttaacacaatggtatttgtgtatctaaatgtaggatataccagatagaaactggtacacgtgtatagggcacttaccattaatggactggaagttactctgggtgagtcagtgagtgagtggtgaatgaatgtaaaggcctaggatattactgtatattactgtagactttataaacattgcacactttggctagctaaatttatctaaatttttttcttcaataattaaccttagcttactgtaacctttttattttataacttaaaaatttttttttgactttgtgatttttttgcaataacccttggctaaaaacacacattgaacaactatacaaaaatatatcctttcttcatacccttttctatttaaaatttaattttaattttttttatttgtttgttaaaatctgagacacaaacacatgtattagcctaggcctacatacggtcacggtcaacagaatcactgtgatctcttccacatcttgtctcactggaaggtcttcagtgccagtaacacacatggagctgtcatctcctatgataagatcttctggaatacctcctgaaggacctgcctgcggctgctttacagtttgtttgtttttttttaaaataagtagaagatatacactaaagtaatgataaatgtatagtatagtaaatacacaaaccattaacagttgtttattttcaagtatatgtactgtacattaattgtgtgtgctgtacttttatacaactggcagcatggtaggtttgttcacaccatcttctccacaaacctgagaatcgtgttgttgcactgcaagtcattaagttaggaattgttcagcttcattataatttgtgggaacataagatgtccttaaatagcacataactgtaatgtgttttttttaacatcttggttttttcagcagctatgttagtatccagcagataactggcactctggacatttgatggctgaaaatattcacggttcattcttttcttcgaatgagccccaataatcattgcctcctgaattcctctatcaatattttgtcctatcatttgacatttgcatatattgtctgtaatctcttctactaattataaaaccggtgaggctaccttattcttttttttatccctttgtgtttaaattgttgcacaggctgaattatgtgttattatcactatatataatgtaatgtatattattattctgtgttattattcttattttgcctgtgtatatgttcattgaagaccagctcatttgttctaattgaaattgcaagtttgcatgatgattgagagcatagactctggaaccagttgcttaaatttgaattatctggtgtatccgtggacaaattacttaacattagtatacctcagtttctttatacagtggagatttgaagcttgtataatttatgtaaggtggttaaaacaatgcttgacacatctcaagtgttatgtatgttatggaagtttcaagtagtattgattggaagaaagttgagtaacatcaattcttaatttactttacttgtgtttgtatttttttaaagatctgctcatcacttttcgttaaaatggccagtttctaaacgtatattttgtttccttaaagttttagttacctgctcttgaggcacactatcatggtaatgaatgagaatgagacctttgacaactgctcttactttatattttaatttgatataagttgggctctagcatccagggacactaatccaccatgtttgttaatacttataattgcaaaaagatatgagagacattggaaacactgacaaaattcactgcttgggcttattgacggctttcattgctttgtgccgcattgtactggcagtatgcattaatcagctgtcctgtgcagtttcttgccttgctgcttaatcacttgactaatgacatttttgacaaagaatacagctagtttcctacagctgaattacgtatttcagctgttgatataaatcactcttttaacagttgaaatgtttcaaaatgtgaaagaaaaatgcaatttatgtccccagaaacacgatttttcaaaagtatacttgtatgttgaaattaaaaacaaattctgtgaaattgaatttgtcatgcagtaaatttttataaatctcttgttttaattattactgctgacagtggatggcagaaatgaacgttgtatagcagtagtaagacttaaagtttgtttttgaatttaattgcataagcaacatttcagttaattagtttaccttttatttagtctcagcctaactagtcactgtttaacttttgaagtacttttgcttgggttatcagatttcataataaaagtagttgaaatatcatactgttaatataagaggtcatctgttttgtattagttctagaaagctttctgcacctgaaaattacagtgttcatttcagttagttcatgatctgtttttagaatctcattatgttcatgtttgagaatatatatgattaaatatgtcagagatagggagcaaatgtttcagtatctagaagtccttaaatcctgagtcttagtgatgtggaagttcttccactaaaaaaggtggtttgaggggggggacctgtttgtctttctttcccttttaatcaaaattttctagaaataatattattctttatactttttgattaatatttctattaaaatctatttttacagtataaaaggatcttgttacccccaaaatatttttaaaaacatactctacaggttcttgataccttaatatattaaaaacaaaacataaccaaaatgtaagaaaataatagcaatgaaatcaaaacaaaaagttaactttttaatatgagagttaagagttagctaatgtcactaaataataacatgtagaaaaaagagagagagctgtcttgaataacaggataccagcagaagaaataatagacatatttaggtcatcatcttaattctttttttttttttttttttttttttgagacggagtctcgctctgttgcccaggccggactgcggactgcaatggcgcaatctcggctcactgcaagctccgcttcctgggttcacgccattctcctgcctcagcctcccgagtagctgggactacaggcgcccgccaccgcgcctggctaattttttgtattttcagtagagacggggtttcaccttgttagccaggatggtctcgatctcctgacctcatgatccacccgcctcggcctcccaaagtgctgggattacaggcgtgagccaccgcgcccggcccttaattcttttgacagcatttttacttatgtgtcagttttctccctgtaatgtatttaagctattattttgataggttagtgtttaaacgtattatatatgttaaaactaatagtttagtaatggcatacttttactggcacaacattggaatggtgttgattagctatgtatatgagtaggcggagaaaaagtatttagtgataactagttcacttgaagtctcagctataccaaaacctcctaaattaaaaacaggatttcagttctgataataactctgtcctttaccagataaagtagtatttctccttcagtgacatgagactatgggtataaattgagttgggatagatgaatagttgtcatcattatagttatggtgcattaaaatccacatggcagcaagtagtagctgaggcagcagttcaattgaggttgtacaaataaatctactgcattgctatagtatcatactttactggagggaacatttgctgaattgtgccctagtcagtgacacttaactgaataaattttttttttaaattggctgggcaccatgtctgacgcctgaaatctgtaatcccagcactttgggaggctgaggtgggaggattgcttgagccctggagttcaagaccagcccaggcgacatagtgagaccccatctctgtaaaaaaaaaaaaaaaaaagaattttaattctttaaaaaattatataaaattaaggaagcatttaaagctgtaaagaaaagtgggcgtatcaatgtgtgtctttaagggaaatagtccttgttgttgttgtagttgttttttaagacagggtcttgctgtgtcacccaggctggagtgcagtggcacagtcatggcttactgcagcttcaaattcctgggttcaagcagtcctcccacctcagcctcccaagtctctggagacaagaacccatcactatgcctcactaattgtttcatttttttgtagcgatcgggtctcactatgttgccaggctggtctcaaactcctggactcaagggatcctcccacctcggtctctcagagtgctgggattgcaggcatgagccaccgaacccagcctgaaatattcttaatgtgtctttttcttacttaccatcatcagttcagcaagcttcttaataaatcattaatcattaactgttctgtgaatggatattaagaaaatggatgtttgtatttttgtatgtaggtgtttgtattttgtgcattaaatgaatgcttaatagatacagagcactagctaggcattttgagagaagaaacacacatacatagatattgaagatacattcatacacatagattttaaacctttaaacctttagcctttacactttgagttttacattaagagctttgatctgtaataaagcatagtaattattagcaccagctctgaaaccagactaccttgtgtttgaatcccacctcagccacttacagattgactaactttgggcaatttacctcacctctaatcttcattttctcatctgtaaaatgtagataataataatacatatatcacaggttgttatgaggactaaatgaggtaatacatgcaaaatgttttagtaagtgaatgattaatgaatattaggtattattgtgtaattaattgtagatcagtgagaattcttatcgctaaacctctagaaaagatgcttaaatcatattgaggaataatgtatgtgatgattcatttcaacttttactacctttgggctaattagatttccagctggttatgtaacaactgtgtttaggctgcaagttctgtaaaagcgagtatgatcttgtacttgctttcaaatagcttgttttggagcttatataaaaatgatcagcaagagaggagtgaataacgctgaaggaaaggagattatttatttatttatttatttaacctcttttgtgatatgaggaatgtgtattggggttttataattcagagagatatttggggagggggattaggtatggatttggggaaaagtaatgataattcagtggttctgttatatgtattccatccccttgtcatcacccaattgcttcagtaattcaaattatatactaatttatttattaaaaataaaatttaatattgtgaaattctactacctccacaaaatggcagggaaataagtagaatgtatggaaaaattagttgataattgtcttttggcatacttttagtatatcaaatgattcacgccattaaatctttctcagtaagctgtaatatggttattagaactgaatgaaaagcatgtcaggtgtcttggaacaaaagtacacctgtgcacaattgtgtagatatacaaatgtatatattaaaagttttatattacacaaatctcaacaacttttaatttgatatgtgttgattacttaatctggatatgaggtctagtacaatttgaaggtatttaaagtagatcttttatccttgtagaccgaattactttagaaatagaaaatagcaaattctgaaatgttgtcattacatactttttccccttagtattgaatttgaccgggattgtgactattttgcgattgctggagttacaaagaagattaaagtctatgaatatgacactgtcatccaggatgcagtggatattcattaccctgagaatgaaatgacctgcaattcgaaaatcaggtatttacattattttcttgacatgatgcagtatagatgtaacaatttgcatatgtaattatcatgagattattttacctttgcatgacactttttactcatggtgaacactattattgtactatgtatacagagtatatattattacttatatcatctttcttacagatattggttgcttttttcttgtgaggttagccttttttttttttctggttgccaaattaaagttcttctttcacttaatcaaataaaggtctttgttggacatggttgttggagactctatggagtactgaatgaggattaatgtagcttatgaatagtatttgaacatcaggaatttttcccctagcctgcacatatctcaacatattagaattgtttctagttttaagaattttttttacaagaatattctgcttttcactgaaggaatggtgtttatgttttctgtattagagattatactttataagcagtgcttttcaaacctaaaatactcttaaacactaacagtatgttaagactctactcctgatctgctccccaaaaaatctcagaagaattctagaatctgcttttttttttttttttttccttctaaacaagcttcccaagctgttctcatgagcactggctttaaaagagaattatatgaggaaatcatctaataataactttgtatagaactttgaacattttcaaaatagccatccttgaaccttttttatctttaatgaatggcatacatagtatgtttgttacagtctttgtataatttatttgttataactttcttttttctagttcatttataaaaatactatatcgataattggtgagcttccccattcatttgtggcactcatcattgagaatctgttatagtttatgtcctaagtgaagaggatataacatgaattagatacaagtttattgaattcttatatatcaggcattatcctaagtgcttggtctttagcagacctatgaaatagttaccattattgctccattttatacaaagaaagctgagcacaggaaggtaaataacctgcctaagattatacacctgctatatagaggagccaggattcagactgaagtagtttggttctagagtctgtgcccttaaacatttcctgctccttatttataaaatggaggtcacaatagtaatacttatttaataggattgtacttttaaaaaatccccataatgcactcagaacaacacttggcccatggcaagtactcataatatattacataatgaaaacgtggattagaaagtttaaatgtgctgtctacctgttctgtatttgtatgtgtaaaaatgtgcaatacttcctgatatattggaataaatggtgaaagcgctcaaggctgaaagctgtgggcctggggctgaaaggatcaatacctaaggatgcctaaaatagattcggagcacatctactgtgaaagtgtactaaattagccagagccacagctaataagtaacagatctggaatttgaactcaagtctacctaaattcaaaatgtgtctcttaattgttccagataatttctaccagaaattctaattaagtatatttaaaaatgcaaataaactcttccagtctctggaatttagcatcaatgcaactagtagaaagcaaaagaccttgtgttcatgtcttagaagttacctacattaactgccttctaagtaacttcttccataatatgcattccctttactatatgcgtgatgcagatatgtatctcagcagaagtttttagatgttgtagacttctggagtacttgagaatagccaaaaccataaatgataaaagtttgattctaacttttagatgcttttaattggaattttagtcataagttataattagtcaagtcaagacttttgggatgtaaatacagaaacccaattcactgtagtttatttggcttatatgatttggcacaactggatccagggggttaaacagtctcatcaggtctgtcattctgccatggtatgccttgagccctctggatagtatcaccttcactgatagacatcgtttcctcatgtatcaaagatggccagtgatagctctaggctcacatccatcttaacagctagtgatcacagtaaaaggtggttagggtcattacttgttaatttttatttttaaaatttcaaaattattggtatgtcttttcccaggtatgttgtgggcagaataatgattgtgaactgatagagaccattttaaaatagtgcaaatctttctgaacacattaaaattatttttatcccattgttatttatttttatgtaaagtaacttttaactgtatttctttcagctgtatcagttggagtagttaccataagaacctgttagctagcagtgattatgaaggcactgttattttatgggatggattcacaggacagaggtcaaaggtctatcaggtaaataagggtactagttacatgttatatgaatcatacatttggtttgttaaaacttttagaacttcatgtgccttataattacagatttgaagtcactatttagtattttttatacctgtgtaacacctatgcaataccaaatgcttttttttcctgtctcccacttttggtaccatatgcttttccaaagcatttcttcagacttcggtctttatggaatgtatcaggtaaatttctaaaagcaataattttggtaaatgtataaaaagttttggaagtactttatatcaacatcttatttgcttttcatttgttttctagcctgttgtctttccctctccccgtaacaataaattgatatcaggtttttttttttcttgctttattcattttgagatctgtattctatctgaggctactgtcttctttctgcttccaggagcatgagaagaggtgttggagtgttgactttaatttgatggatcctaaactcttggcttcaggttctgatgatgcaaaaggtactgtttgaatctctttctcagcacctccttctccctggccctcttaactgtaattcctttcatcggcagaaatacaaatatttactcaaactcatgtcagtcctttgtgattactgattattattattccccatgttgttttgttttgttttttgagatggaatctcactctgtcacccaggctggagtacagtggcacaattgtggctcagtgcaacctctgcctcccgggttcaagcgattctcctgcctcaccctcccgagtagctggagttacagccacgtgccaccatgcctggctaatttttatatttttggtagagatggggtttcaacatgttagccagactggtatcaaactcctgacctcaagtgatctgccttgctgcctcggcctctcaaagtgctgggattacagatgtgagccactttttttttttttttttttttttgagatagagtttcactgtgtcgcccaggctggagtgcagtggcgcagtctcggctcactgcaacctccacctcctgcgttcaagcaattctcctacctcagcctcccatgtaactgggattataggtgtgtaccaccacacttggctagtttttttttttttttttttgagacggattctcgctctgctgcccaggctggagtgcagtggggtgatctcggctcactgcaacctccgcctcccaggttcaagcgattctcctgcctcaccctcccgagtggctgggattacagccacccaccaccatgcctggctaattttttgtatttttggtagaggtggagtttcaccatgttagccagactggtatcaaactgacctcaagtgatctgccctgctgcctcggcctctgaaagtgctgggattacagacatgagccaccttttttttttttttttttgagatagagtttcgctgtgtcgcccaggctggagtgcagtggcgcaatctcggctcactgcaacctccacctcccgggttcaagtgattctcctgcctccacctcccatttagctgggattataggtgtgcaccgccacactcggctaattttttttttgagacgtaatctcgctctgctgcccagactggagtacagtggggcaatctccgctcactgcaacctctgcctcccaggttcaagcgattcttttgcctcagcctcctgagtagctgggcctacaggcacgtgccaccatgtccggctaatttttgtatttttagtagagatagggttttaccatattggccaggctggtctcgaactcctgacctcatgacctgcctgcctcaacctcccaaagtgctaggattacagatgtgagccactgcacctggcttcacccagttaattttttaaaaatttttagtagagatggggtttcaccgtgctggccaggctggtctcgaactcctgacctccagtgatctacccacctcgacttcccaaagtgctggaattaccggtgtgagccaccatgcccggcctactgtttatttttttaaaaatccaagcaggggccgggcgtggtagctcatgcttgtaatcccagcactttgtttgggagattgaggcgggtggatcacttgaggccagaagtttgagaacagcctggccaatgtggtgaaaccctgtctctactaaaaatacaaaaattagccaggtgtggtggtgcaggcctgtggtcctagctactgagggtggctgaagcacaagaattgttcgaacctaggaggcagaggttgtagtgattccaggtctcgccattgcactacagcctggatgacagagcgagactctgtctcaaaaaaaaaaaagaaaaaaagaaaaaaaatccaagtagagaaattgatttctcttcttgagtgaatgaaaaatgaatgtactgcatccttattctaatgatgtttttagattcattccacatggagacatttagaaattgctgctatcttataaccaagtcctttagatagatataccaccaaataacctttttttcctggaaatatttagaaatctctatgtgctgcattgtatttaatttctattgtatactaaaatctcttaacgaagttcatcatatatcaaggcaaaattctacatcactttttgccaatttaattgaccttttttttctgtttcttgtatatccatctttactattcactgttttctgtttttccttaatgtgctgttttggtctggttcttctcaccattaagtgtataaagctatgttaacagatttattttatcttaacattactacccttaatttctttgcctttttcttcttttctgcctataactttcagtattgttttgataggcaaggatagctctagcattggaagctttatttcgcatcatgttatgcctttccctttggccttttaatacataaaagaaatgaaataatggagcacagtctattctgtaaaaagggaaacaaacaagagtggactgcccctaaaaagttttgggccatagagtagcaagttgtttattcctactatatacagaatggaataccttttttccttgatttaagaactcgtcagccaggcatggtgactcacacctgtaatcccagcaattttggaggctgaggcaggaggatggcttgaggtcagaagtttgagaccagcctgcatgagaccctgtctctacaaaaaattttaaaaattacctgggcgtggtggtgcgcacaggtagtctcagcgcttgggaaactggggcaggaggatctcttgagcccaataattcaaggttacagtgagtgaggattgtgccacactgtactccagcttggatgacagagcaagaccccatctcagaaaagaaagagaaggagggaaaagggggtggtacagagagggagaaggagagagagaggaagggaggtgagaaaaagagggaagagagagaagaaagagcaagaaagtaaagaaagaaaaattgtccttgaatttctaaattagtgagagtaccatgttacaatagatatatttattttagtttttttatagtgttctttaatgcacaaaattgttttcattttgaagaagtccagttggtgagtttattttttcttgtgttgtctgtgcctttggtgtcatatccaagaaatcattgccaaatccagtgtcatgaaggttttcccgtaagttttcttctaagagtttttaactttttaatttttgtttttaaagattttttatagttttaagctcctatatttatgtctttgatccattttgagttaatttttgtaatatgatgttaacgatccacctttattcttttatctgtggatatttcatttttccatcatcacttgttgaaaaaactgtcctttccctattgaatggtctggcacccttgtcaaaaattatttgaccatatatgcaagagtttatctttagtctttctctgctcttctgttggtttatatgtcaataccacactgtaaggctgttttgaaatcagaaattttaagtcctccatctttgttctttttcaagattgtttcagttatttgggatctcttgaaattctatatgaattttaaggtaattttttttttttctgtaaaacattctttgaggttttggtaaggattgaattgagccttattgatgttactgatcttttcaaaccaccaacttttgtttcattgatttttctcatgtggtttcttgttttcattcatctatttttgctctagttttttttttccctgcttactttagatttaacttgctcttattttcctagttttctaaagcagaagcttacattattgattttagatcttctaatatatgtattcagtgctatgaatttcccttttatgtagtgcttttgattcatcctgcaaattttgataaattgtatttttattttcacttagttctgaatattttaaatttcccctgagattccttttttgatgtatgtgttacttagaattatttgggaatttttcagctatttttctgttactgatttctagtttaattccactgtgatctaacagatacaatgtatgatctccagtctcgtaaattaacatgttaagatgtgttttatggccccagaatgtggtgtgtcctcctaaaagttccatatgagcctgagaataatgtgtattctactgttagtgaaagaaataatctgtagatgtcagttacatccagttgtttgatggtaccattcagtttagctgtttcattgctcattttctgattgttggatctgtccatttctgataaagggatgtgtatgggcctgtttttagactctgcattgatctgtgtatctatctttttcttttcttttttttttttttgagatggagtctagctctgttgctcaggctggagtgcaatgatatgatcttggctcaccacaacctccgcctcccgggttcaagcgattctcctgcctcagcctcctgagtagctgggattacaggcgcacgccaccacacgtggctgatttttgtatttttagtagagatggcatttcaccatattggtcaggctggtctcgaactcttgaccttgtgatctgcccgccttggcctcccaaagtgctgggattacaggcatgagccaccatgcccagccctatctcttcttttacttgtaccatgttgtcttgatttgtagcttgtaataagtctgaaatcaagtagtaagtccttcatccttgtttttgaaaatgatttttaactcttctatttcctttgccttttcatatacattttagaatcaagttgctagtacctacataaaatcctgctgagattttgattgccattgtattcaatctatagatcaatttgggaaaaattaaaatcttaatatactgagtcttctagtccatgaacatggtttatctctccatatgtagggcttttatgatttcttttctcatagttttgtcattttcagcatgcaagtttcgcaggtattttattttttggtgctaatgaaaatggtatttttaaaaatttcattcttactagtttatagaaatacagttgatatttaaaatataaacattgtgccaatgtacttgctaaagtcactgtaggtatagattactttttcagattccttgggattttctacatagccaattacgtcatctgcaaatagaaacataaatactttttcattttcaactgtatgcctttctttcccgttcctgccttgcttttttgtactggcaaggacttcagtataatggtaaataggaatgacaacagtgaacctttcttgctttgttcctgatgttagggggaaatcttgcagcttttcatcacttaatatactgactaaattaggcttttagtaggcacctgtgtcaatttaaagacgttcttttccattcccttgtttgctgagaatttttatcatgatggatattgaattttgttaaatactttttatgcacgtatcatcatgtagtttctctttattaatattatgaattatagtcattgactttcaaaacttgaattagccatacattcccaggataaacatgaatgtattattctttttctgtatttctagatttgacttgaggtttttttgtttgtttgtttttttcagagggtgaatttttttgttgttttttttctgtttttgtaatttttcgtgactttgatatcagggtaatgctggcctcataaaatgattttcctcttctatgtgctatgtgtttttttttttcttatactttttttttttgagacggagtcttgctctgtcgcccaggctggagtgaagtggcatgatctcggctcactgcaagctccacctcccaggttcatgccattctcctgcctcagcatcccgagtagctgggactacgggcacccgccaccatgcctggctaatttttgtttttgtatttttagtagagacggggtttcactgtgttagccaggacggtctccatctcctgacctcgtgatccgcctgcctcggcctcccaaagtgctgggattacaggcttgagccactgcgcctggcctattcttttgttcttaaatgtttggtagaatttgtcagtgaagctttctgggcgtgtagttttctttgtttgaaggttttaactaagaatttaatttccttagtagatttcgaactaataaacttatctgtctcttcttgagtgtaatttttgacagttcatttccttcagggaatcgatacattttatttgttacaagatttatgggcatcaaagtccataaaatgctcctccacttacaatgggattacagtcccaataagtccatcataaattgaaaatgcatttaatacttctaatcgtagcttagcctaacctaccttaaatgtgctcagaatatttacattggcctacaattaagcaaaataacacaaagacttttacaatacaatgttgaataatacaggtaagaatatcataccacatatcactagcctggtgaaatatcaaaattcaaaattggaagtatggttcctactgaatgcacattgcattctcaccattgtaaagtcaaaaaatcataagttgagctatttaaattggggactgtctatatttgtaatatactcatatctctagggtttgtagccatgctttttttttttttttttttgtttttttgtttttttcattacctctgagaagctgtgatgaagtcatcttctgtcttttattcctgataattggtattttgtgtcctctcgtttatttattgtttattaatttaggtcagcttggcattaggttcttaatcttttcaaatgctcaacttttggttttgttgatttttctgtaattttctatttttaatttcatagatttctgcccatttttcttcttgctttgggtttaatttcctcccctttctagttttttgaagattgaagtttatgtcatttgatacttctgtctttttaatctgaacattttttgttatatacatttcccattaagcactactttagcaaattttgaaacaaatttgaaaccaagttttcatgactatttactattatatttgctattatattattttcatgactagtatatttgcttttccattctgtttaaaattctgtttgatttctcttgttattctcttgttcatctatggattgtttaaagtatatttaaatttccttaaaattttcagaaatcattctgttgctgatttataacttaatcctcttatggttaaaggatatattttacatagtgttaacttttttaatttgttatttgttttatggtccagaatatgaactaccttgataaatatttcaaatgcattgaaaagaaactgtactataaatgctgtttggtgagtgttctgtaagtgtcagatcaaagttgttgctactgtatttctgattttctgtatgcttgcgttttttttttttttttttttttggtctcgttttattgattatgagacagaaatgttaaagtctgattttatttctctgtttagttaccttttttgtgttaagtgtgtttttacctgatatattttgaaactattgttaagggcataaatgtatttgggattgttatgtcttggtggactgaatcatttgttaatatataatatcactatccctgtcaatattcctctgaaaactactttgtcacatacttatcaaactactgctagtaatctctttttcctctcctctgggattttaattatgttagtgtattagaccctttcgttctgtctcatagacctcatattctttttcttgtcaatatttttttctcttcaggttgggtaatttatattgttctgtcttctagctcatgattccttcatctgtcatctccattttgcaaaaattttcatttgattctttttaaaaaaaaaatagtttctatatattctctgagtacttctatctttccattaattttaagtttgtttatttttaccccatggagtataattacaatagttgctttaaaatctgtttcatttaatgtcttgggatccaacatctaaaccttaggactgacctttgttaattgtgttttcctttgaaaattcttcacattttcttgggtttttgtatgttgaataattttggggttgtctcttagccattttgaatattatattgtaagatgttgggtcctgtttaaattgtgtgggaaatgttggttttttgtttgtttcttcatttcttagtaggtgatcagttggcttagatttagactgtaagttctgtcttgctttccctaggtgattgttgccttgtcaaaggaaacaatcagttcatttctcagagcttttgctgtggtactttgagtctgcctaatgcccatgccagttagagcttagtttaggacttgggtcatcttttcaactgtagttcagtgcgcaaagcatttgctgctctgctttgtgtccatcttgcacatacacagctcagaagtgactgtgccagtgaatgcacagaactgtagaatctccttctccattactttctttccaggtttctccccgactctttatctcccagggcccccttttactgatactttgtcaagaaggttgggttgtttcattttaggagactttagtgcccagtctactgctgaattctgttagtagggcccaccacaagggcaaagaagcaagagaataaataagaaaaatataatggggattcgcctttttcatattcgttatatcacagatgctcctttttatatacacagagttttactctgagtattagcttctcatactgctgtagctctgtgactgaagcccacccatggggaaaagttggaggagaaaaagagtaaaaaggaaaaaattactcccaatccctggtttgctgaagtcattaataaacacaacaattttacttagtgtttgttgcttgaggtgctgactttagcttgccaagggagaagagagggggaaaaatggtactcttcatcccgaatttcatttaagtttagaattctgtcctggaaatgactgtttttgtttactttttcagtttcctcatatagttgcttttgttttttggatattgtccagagtaaactcaaagtgagagagattggcttactctctcagcttggcagtaaaagtctcaaatgcttttaagcccatcttaagagtattatttagtgttacttaaatgtatttattactcttgtctgtttggcgatcatataaaatattgcctttgtgataactttatagttagagaatattttaaatcacttattttatacaaatatattttgcttattttctatattttgtatttagtaaatgtttaactgaggaattttttaaacagctatttttttcattgcttaaataaaaactgagttcatatgaatatttttcctacatatgctgtatatttttaaaataatttagttccaagtatatatgcacgtaattacatgttaaagaaccatcattatgtggcagctaatcagaaaggaattttatgagtcattttaaaggttcttttggagaaatatattttcctttttaaatatgtaacctgagaattgtttccaataaataaccttgcctttgaattaaacacattctttaaaggtatttttctttaaatgtgagtttgaagaatttagactgtatgatagcagaagttacaggttcttcttcattccagatttccttaatattattattattattattttgagacagagttttgctcttgttgcccaggctggagtgcaatggcacgatctcagctcactgcagcctccaccacccgggttcaagcagttctcctgcctcagcctcccaagtagctggggttacaggcatgttccccccaccctcgccccgacagctggctaattttgtatttttttaaatagagatgggatttcaccatgttggtcaggctggtctccaactcctgatcttaagtgatccacccacctcggcctcccaaggtgctgggattacaggcatgagccaccgcacctggcccttcattccaaattttcttagttgcataagttaatgcacaagtgacaactgtgaagtcttggtagattttagaaatcagttagtgaaactcatgctgattgtaatgcttccagtttttcatcagcagattaaataacttaataaatagcattatgataacagttattataatttataactttagaggcaattacctttcctataagttaaagctttactaagtatattctctcctgaatttaaatgaaatgttaaagacttatgttgatcagcatccatcatggcctccagggatctctgcctgctagtgttcttatgcttgtgtagttccccttcacctaccttgttccaggcttcatttatgtgaccagtagatgtctcttctaaaattaggttataaaagactctgtagcctctatcttcatcattttctctcttcgcagtcgcttggtttgggagaaacatctgcgttgtcacaagcccacatggtggggaactgaagccttatgccaaaagtcatgttgagtgagcttggaagtggtagtttaatagtctagagtcctaggagggacagctcaactgcagtgtgttgagactgagccacaactacccagcttacctgctctgagattcttgacctccaaaactgtgtgagatagtatatgtttgctgttttaagtagctaagctttagggcagtttgctgtatgacaacgtctagctactaatacatggtctgttgtttccctttgacaaagtttttaagagtccagcttatttatatttggtaaacagtattaaagtttacatctttgtatttaatctttcatactttttatagaggtataaaacaatacacattgcccctgagttttatggtagtttttgttgaaatagcactctccctttttactcatatgggtaactttctgttttctgtaggacctggacagtagtttagaagcgagtctggaagaattccatatgaaacttactcatatttgcacatcctcattaaagcattgggctgttttactgtgtcaaacttctgtccctgttttctctttctttggtaatgaattctttcttaggatactttggtgcaaatagacatgcagtaggcgctgtcagagaaactcagaaacataaaccttgcacactggaactgaatctgatgttattatagataagcaatatcttgttctctatttttggaaacaattttagcaaactactttggggaatgattcactcaaattttacagattattagatgatatactttattctgtagtgtagttggattttttaagattcaggatttcaaaatcgaactgaaaaattaggtgacacttagaagacactttacacattaacgttaaagaaataaaacttgtatagaacacttagtgttaagtaacaaatttatggccaactagagtatgtttctttattttaacctcctaattatggtatgattttcctaatggttactcttttgattatttactgagagccaaaggaggccatatgtaaataaatacagtgtattttatttgatttaattgctttagctcttcacctagaagatgatattttcttttaaatttactttttctttcgaagggaattttcgtcaataaattctgaaatttaaattttggaagttaaatgaaattcttactaccatccttgcaaggaaaaagtaacagtaaaggtgttcttattaatttgtatactgtctccttattttgaggatcgcctcatttatatttggcttagtttcttctcatacttgatttcttctacgcttcctccaaaagattatactattttatctttcgatctgtgatgccatcttaggatattaaatagatttcaatattatttcattatatttgttgtattagttttttagggctaccataagaaagcataccacaaacaggctggcttaagacaacagaaatttgttctctcatagtactgaagaccagaagcccaaaattagattgttggcagggccacactctctgtgaaggctctggggaaaaattatttcttgtctccttcctaatttctggttattgatggtcattcttattatttattgacttgtagctgtatcattctggtcttggctctcttcacacatggccttcttctcactgtgcctttgtctctaaatctctctctccttatgaagacaccagtcaatggatttaggacccatcctaatctagtctgacgtaattttaactttgttacatctgcaaataccctatttccaaataaggtgatgttcacaagtacctggggttaggactgaaacatgtctttttggggaacacaattaacacctgttttgtttaataaccactgaaattattgtaatctctataccgcttttccatgctgtattcatttagtgtatctttatttttaatcttagttacccttgtagctcagacagttatattgaattctaatatcttatatattgaaaattataatcatggtggttaatgttgtgacttatttaaataatattaatgattactgcattgagaaaattaccatgaaattacaaaagacctgccacccttctaacttaactgtcattctgtcagtactgtttttttctcacttatatttaattaacgttaaacaacgatacataatgcttgtttgtaaaggtttttagtgattataagtggggttatgggcacagtaagtgctccatacttatctattgtgaattacctttgggcctaggctgttagagtataatccagtcaaagtccacttaataatctaatctttaagtgctatgttcggcatgttgacttttaattccagggagccatctcatcttagaattgtatgtcgtgattgaccaaatgattgcattttgattgaaatagtacatcatgcttattggagaataacatggaacaaatcaaatattgctatttaaaaatcttactccatctctactttaaaaaaaatatattagccaggcgtggtggtgtgcatctgtagtcccagttactcaggaggctgacatgggaggatcacttgaattcaggagtccaaggctgcagtgagctatgatcataccagtgcactccaggatgggtggcagagtttgagaccttgtctcaaaaaatactactactaataataatgattcctattttaatattgagggtcttagtttactgtgggaaggctaataaatttatcagattgtaaattagcaatattttttgataatgattaatttctacttggagatttcacatattaaattcttacgtaatcccgtttcatagaagtggtatttattggaaccagttttacttattttattcactgctgtctacaggttactgtatcagtatttctaaaaatattctaagattttttactatgcttccattcccaatactggtttccaaccccaaatgcatgttagaatcacctggagagcttttttaaaaaacaacagtacctggaccctctctggataatgtcctggatgggacactgggacagattgaaagatggatggaaagattttgttgttgttgttaatgttcatttatttattctaatgtgcatccaggatgacaacttatatactgaaaatctattttatgggtgtatcctgtcttactgtttttattgttgaaaaatgatatgatagttgctctggtacctttgtaaaatggcaactcattttctgcttctgctttcaaatcagacctattttgcttagtcagctttgctctccctaatcattacaaattttaatatatatcactggcttagactacttattcaaatacaaaaccaaaattttgcaatttaactaaataattctagaatatattactttagacatatttaagttgtataactgaattactacataaaaatttaaaatcatgaaattcttaattgaaagataaaataagaacagtttccaagtgctttaaagatgtttgtgtacattttcatatttatgatgtatatcagtatacagtcatatgcacacacatttaacgaataattggctgggcccagtggctcacatctgtaatctcaacattttgtgaggctgaggtgggcagattgcttgagcccaggagtttgagaccaatctcagcaacgtgatgaaaccctgtctttacaaaaaaaatagaaaacaggtagctaggcctggtgacacacacctagctacccgggaggctgagtggggagaatcacctgagcctaggaggtagaggctgcctgaagtgaggcatgattgtgccactgcactccagcctgaatgacagagtgaggagaacctgtctcaaaaataataataataataaaaagaataatatatataaaactatatatatatatatatatatatatatatatgaaacaaatataccacctagctccagattgctttttttgttcctgtcttttatgtcttagttgtgggtctgtgttacatctgagtataaatttatcgtttatctatattgatttttcctttttattgatttttctttttttatttcatttcatttcattttttttttttggtggcatgatctcagctcactgcaacctctgcctcctggactcaagtgattattccacctcagcttcctgagtagccaggactacaggcctgcaccaccatgcccagctaacttttgtatttttagtagaggcagggtttcaccatgttgcccacgctagtctcttaactcctgagctcaagtgatctgctgcctcagcctcccaaagtgctgtgattacagtcatgagccactgtgcccgacctttttatctatattgatttttgacattgaaactaagctctcttggttttaatgttattctgttattcagtcattcagtgatatggtttggctgtgtccccacccagatctcaccttgaattatgataatccccatgtgtcaaggatggggccaggtggagataattgaatcatagcaggtggtttcccccatactgttctcgtggtaatgaataagtctcatgagatctgatggttttataaatgggagttcccctgcacacgctctcttgcctgcccccaggtaagacatgactttgctcctcattcaccttctgccattgttgtgagtcctcctcagccgtgtggaactgtgagtcaattaaacctcttttttttttttttaataaattacccagtttcaggtatctttttattagcagtgcgagaacagacaaatacattcagctttaacacttttagtcctagtaaaccaaatgttttagagtggcacaaaaagatttctggagcaataagccaactttcccaagttacagaagcatttactaatgtattacttgtttctctttttgtttttattgtcctttgcccttagtgaagctgtggtctaccaatctagacaactcagtggcaagcattgaggcaaaggctaatgtgtgctgtgttaaattcagcccctcttccagataccatttggctttcggctgtgcaggtaagaaatgaaagcagatttgtcttcctttgatgttggttaaatatcatggtaaggataggagagcattttaaaacaaataactcttttgtaggtttaaatgttgtttttattattaggctctaaattagaagtatacagtatgccatcattactcatttagtgctgtaccttaattgcactattctgtcacttatctttaatacgtagatatgaatttgttaatttttgtcatttttcttagtgtttatatgcatgaattaatgcttattacttattcacaaacataaggtcataataacatttaaacaattaagctattattaagctatattgtataggcacaggaacactttttttaaggcaaactattctttcaacaattatttattgagtccctactatgcacaaagcactcatctagggacagtgaataagacatagtcttgtatcatggagttcatgctaacatagtattcaaaaaatgtttgctattattatcataccaaataatcatttggtaaattatttttcttaactagggtgaccatatgtcggtgtttgcctgggacagtcctagttcacaccgtttgtaccattgtatttattattagtgccctctttcattcacaaaagtgtcatgagttggaaggaagataaatcatatggtcaccctacccttaatttttttatctttcatattttcccccttgaatatttactaaaatagtaaatacttgtaatttggcttctgaatggtgaagtcttattttttattaataatatcagggttttacaaaaaaaaatacaagttagcaccatatgatggagacagtagcaacttttaaaaaaaggaaatgcataatttaaaccatgtcactatactttttccttttattcaactcactgtgtcactgggctactgacataatttcatagttcagtttaaggaggacatggactaacaagtagatgtgggtaaaattctcttttttttagcatatagaatttatttttaatgattacatgctgttttcatttgatcctacttctgtcttgtttaaatacttactttgtcacaaattagaaatgtgaccttgagcaagttctttaactttctcccaagttttttatctgtaacatagaggtagagctgtttggggctgttatgaggattatggaaaaaagattctttgtgtaaagttcttatagttgttatttttattattaatattatgtattcaattaaaatatatactcttagtttattgagtttgagtgtatgttctgttttataaacatactggccatcatttatggatataatattttatcagtatttaattaatttgtaccaatgccagatatgaatattatcaaattttctccttcttggaaaataggaacctactttaaaaatgcttccgctatctgctaggcagttttccccagtattatacattttcatacatttcttagttatttttctcatttaattttccatgtaagctttaagatttatagttttccaattctagaaaaattcttttgggattcttatcagactttcttgtatttatttgctgattttagaaccattggcattattgtgatagtatgtctttccacagttacattaggtgtcttttttatttgtttgggttttctttttttttggtttttttgtttttatgagacagggtcacccaggttgagtacagtggcacgatcacagctcactgcagcctggtcctccctggctcaagtgatcctccaacctcagcctcccaagtagctgggactacaggcgtgcaccaccacacctggctaatttttgtatttttcgtagagatgaggttttgccatgttgctcaggctgttctcaaactcctgggctcaagcagtctgcctacctcagcttcccaaagtgctgggatcactgcgccctggctattgtttgggttgttttctgtctttcaatgagatttcataatatacttactttaggttctggacttttctggtcaattttttttcctatatatgttaccatttttgttatttttaataaaattttattgtccactctttttttaggttttttttttttttgctaaatgtagacaaaacttgttcatatttggatatttgttttgtatcttgggaccttataaattttttacattaagtctagtagctttttagtagtgtttgggttttctgtttatacttgatatctgcccaaagcagtaattgcatttcttcttttccaatgatttatcacattctctacctctaaggcagagttatactagtgatagcatcctcccccatctatttcatttagttgaatgagctttagtgttctgctgtttagaatatctacttttgaaaaatattttattattcaaattgttttactttactgtttcttaattagaagcaaaacagtattttatcaagtaccttttagcaccaattggtgcttatgctttttctaacactgaattgtatttttcttgaatgaaccttgctttggcataatgtagaattattttgataaactactatatttaattggtaattttaaatccatatattaaattagcctattattcattttatcttttttaactatctttgccatttttatcatcaatagttttgtaattttcagtgtagaagtcttgaacttcttttgttaaatttatccttattttgttactttcatttctgttgtgaatggaattgcttttaaattttattttttgattgttttgttaatagtgcacagaaataccattgatttttatatatctctcttgtatctctaacactgcttctctttattcttgttttattgtggatttcttggggttttctacacgtagaatcatatctgcagttgaacaatttatgaatgccattttgctttattgtattagctagaagatcaagtacaatgttaaatagaagtggtaaaagtatgaaaaactttttatcatacgtgaagagcgtttagtccttcacaattaagtatggtgttggctgtgaggttttttgtagatactttttatcagtttgagtaattttttatctgttcctagtttgctaagagtttttgttatgaataggtgttagattttgtcagatgctttttttttgcctctgttgaggttgattgtgaggttgatgtcccatactatagtaatatgggacagtaatgttactataatattaaaccagcttttcaagtacttttgtgtctgtgttagtaatggatattcatccgtagttttatacatttatttagagacagtctcactctgtcagagcccaggctggagtgcagtggcacgatattggctcactgcaacctctgcctccccgactcaagtgattctcgtgcctcaccctcctgagaagctgggactacgggcaccagccaccacatctggctaattttttgtatttctagtagagacagggtttcaccatcttggccaggctggtctcgaactcctgacctcaagtgatctgcctgcctcggcctcccaaagtgcttggattacaggcatgagctaccatgcccggcctgtagttttcttatgatgatattttctgtctttgacagcaaagagctactgggtttaaagagtgagttggaaagtgttcattctgcgttctgaatgagtttgtgaagaattggcattattttctttaaatatttgatagaattcattagagaaactgtctgggcttggattattcttttggggaagattttaaattcctaattcaatgtgtttactttttcttttcttttcttttctttttttttttttttttttttgagatggagtttcactcttgttgcccaggctggtgtgcaatggcacgatctcagctcactgcaacctctacctcctgggttcaagcaattctcctgcctcagcctcccaagtagctgggattacaggcatatgccaccactcccagctaattttgtatttttagtagagatggggtttcaccatgttggtcaggctggtctcaaactcctgacctcaggtgatccacccgcctcagcctcccaaagtgctgggattacaggcgtgagccaccacgcctggcctgtttactttttctaggtgaattcatattttctaagttttctaatttattggcataaagttgttaataacattcctttataattcctgtattgtcaatagtaatgtacctagtttcattccactataattatgtattttctcatttctttttggtaggtgtagctaaacatttgctagtttcttcaccgtataatagtgtgtgtggaaaggctgttgtagttcttattgttggaaggtctgtagaatgattctgtaggcttggcttcctgtaatgactcttagctcatcatcagataggccaggagagctgttatttctcagctagtggcactattgaaatcaagaacatgatgccattactgtaatcacggaatcaggaatccttcactacaactcccacaaagctagaaactagacactggaacactacaacagaaaacccccacatctctacaatggtgcttgtaacagaaacattcaaagcacaaggagaacgaccataaaatgttcacctttcaaatcttaaataagtgcatctgattgatggaatctaattcatgtctagaagcataaatgcaagggcatctgagcaatgtagttttaaccttgtatcttgcataggttgtaaacactttaagatggtggaaatggatgctgagggcacattgaggttaggtatgagctaattttcctcggtctgaagcaggggatagtatcagcaaggcatcagtgaggccaatagtgcttaattcattgcctttcattgtacctttcactgactgaaacattcctttaatacaagaaaaactttacaactagaaaactgaccgatattcagtcatcttcatttagaattgaaacattttttaaaatgtagcctgtcatctaaatgtttctctttatgaaataacactgtttctttagctgtattgtttagtttaccactgagagcgatacagaatcatactcatgaagttgcttattaataaatatcatttgtgatgatgaatctgacattaggaatgggctgtacttttcttaaacattgcttttggagttttgagaggtagaaaattagtatatgagctacccaccaattatagtttgacttcctgttgcaagggcactgtggatcctaccagggaagtgaggcatcatgctaattgtaagcttccctgtctgtcttgcttagatcttatatttgtgcttgttacaataagtttgtttctctttgtacttttattttgttattttgttctttcacctttttcatacatataaaagactttacaagtcccaatatagttatcaaaggaataaattagaatgaaaacatatgtcttctgagctttgtgtatgtaataacattgcctcaaaatacattaattaaaatgaaaatgctaagataattcaaatttcagtatcttaggagattttatagatctttctatgatagaaaagcaaaaattaaaagataataaagatgtgaacacgaaagttaacaagtatgtatatagaagatggaatctgtcagctagagaaatccacgttgttttcaatcagacatagattatttacttaaaatgattttttatgcttctctttttcaataaagtcaagcattcattctgatcccaatatatcagacttggttctaaatgattttgacagcttcccataatgaatttgtctctgaggatattcaaagaaagcagcagtagtagtgttaaagggtcccagctaggccttttcagttctttcctatcattgttaatgtagacaaccatttcccagatttttgagataaatcaatttatttatttgcaatatttacatgcctacatggttttttaaagttattttaatgtatttttaatgattaaaaaattatgtcccgtatttattagtcattcattacttaccattatttgcatttaatccttaaagcagaagtgtacaaaaaagagattaatgtaaagcaaatcaatgaggattgaagcaaattaattctctcaaaataaatatgtagtatctttagataatttggcacctgctgagtttgtacaatcttagcaaactaggccatttagaggaaataattctgtactactttttgagtgtgttttttaatgcttttacttctggtgtgggcatgctggattttatatttctaaaaaccaataaaatttggaaggcattgcctctaaatgttacctaaaaaatagaaaacacaaccataaatatgcctagtaattagcacatattttatttcatagaaactgattcctggctggacctggtggctcacacctggtaatcccaacactttgggaggttgaagcagggggattgcttgagcctttgagtccaggagttcaaggttatagtgagctgtgattgtgccactgcagtccatcctgggaaacagagcaagaccatgtctcttaaaaaaagaaagaagaaagaagctgatttctaagcaggcaaaatgtaatatcagtaatttttgcccacagcttgtgcttatttagtattttataactcattgtaaatactttagattatgtgatttatgtttattccttagctcattacagtaatatagtgataatactgtgttttctgcaagtaattacttgtatatgatgcctttagatgaattcaaatagtaaatcaccaaattttaaattatttgatacatattttcctacatttcccagtgataaagcccacaatataatttcgttgttgttgttgttgggacagagtcttgctctgatgcctaggctggagtgcagtggcacagtcttggatcactgcagcctccaccgcacaggtagagcgattctcctgcctcagcctcctgagcagctgggattacaggcatgcactacctcgcctggctaatctttctagttttgcagagatggggtttcaccatgttggccaggctggactcgaacttctgacctcaggtgatccacctgccttggcctcccaaagtgctggtgtgagccaccatgcccagccttacagtgtaatttttttagccactaatatctatgtataaaccatgtgctgggccctgttagtgagtatgaaggtttttttttttttttttttccgagatggagtctcactttgtcgcccaggctggagggcaatggcgtgatcttggctcactgcaacttctgcctcccaagttcaagcgattcccctgcctcagcctcctgagtacctacaaatacaggcatgcgccaccatgcctggctaatttttgtatttttagtagagatggggtttcgccatgttggccaggctggtcttgaactcctgaccttgtgatctgcccaaagtgctgggattatagacgtgagccaccatgcctggccaagtatgaagttttaaacaggatctttacctttgtcagtctagtttgagaaatatcacggaagaattagggcaacatatttcttccttcagataaaattaaaataaacaaatcatgaacatatataaatagatcatattggaaataaatgtttcctgtaacgccgttagtgattttttttttgagacaggattctccctctgtggtccaggctgcaatgcagtggtgtggtcttggctcactgcagcctctgccttccaggctcaagtgactctcccgcctcagcctcccaagtagctgagactacaggagcatgctacgatgcctggctaatgttcatattttttggaaaaacgtattttcactatgttacccagggtggtcctggtttcctgggctcaggcaatctgcctgcctatgcttcccatggtcctgggattgcaggtgtgagccaccgtgccaggccctgttagtgatgttttgatttttttttttgttatgatttggtggtagtagtagtgatgatgatgatgatggttattattattattattattattattattattattattattatttgagatggagtcttgctctgttgcccaggctggagtgcagtggcatggtctcagctcactgcaacctccgcctcccaggttcaagtgattctcctgcctcagcctcctgagtagctgggactacaagcgcacaccaccatgctcagctaatttttgtatttttagtagagacggggtttcaccacatttgtcaggcttatcgcgaactcctgacctcgtgatccgcccgcctcggcctcccaaagtgctgggattacaggtgtgaaccaccacacccggccatgatttatttttttaaaaagtctattctcgctctgttgcccaagctggagtgcagtggtgcaatctcagctcactgcagcgtctgcctcccaggttcaagcgattctcgtgcctcagccttccaagtagctgggaccacaggtgtgtaccaccatgtctggctaatttttttatttgtagtagggacagagtttcaccacgttggccaggctcgtcttgaactcctgacctcaagtgatccacttgcctcggcctcccaaagtgctgggattacaggcgtgaaccaccttgtctggcctggaattaagcattaaaaattcttcactctgtggtccaggctggagtgcagtggtgtgatcttggttcactgcagtctctgccttccagactcaagtgattctcccgcctcagcctcccaagtagctgggactacaggagcgtgccacgatgcctggctaatgttcatatttaatatggacattaatattaatatacctttttcagcaaaaagagataaacttagtatggataaaataaatgaaattattttttccctattgataaacagaatcagttcttttcaaattatgtattttttatgttcctcaaggattgagagtaggaaaagatggctcaagcagacagggagaaaaaaagagtaaaaagggttctgattcctacttgtgctttaagctgagcagctcttctttaatctgttttatatcatagggtttcaaataaattaggtgagggaggactgggttttttaatgtttctgctactctttcttaactgagacttctttttaattgtgggaaaatgtacataatataactgagacttccttaaaaattgtattaagtttttaaaaattgtcttaattattttaaattactgacaattgtggtttaatctaatgtgcagataagtaattgctacttctttgactctaggagaatatcacaattgcttgtatatctattgtggattggtaagggttggagagattattcacaaagtaaagggtaaataataatagctaacattagtgcatctttaaggttttattcaggttggaaaccagggccaactgtatgtgatagaaaataggaagtgatatcttctaattcctcctcaaatcatgaacaaagatctgacaactaaattgagagcaggcgttaaggggaaatacttctaaagtattccatgtgtgtttgtgtaacggatacttagcttgctctctcttttgtcaaagagtagctttctttcagttctctaaaacagtatagtgagataccatcaaaggcttaaaggaagtaaaaaatggtttaagtattgctattaaaattaataatgagtctgggcacagtggctcacacctctaatcccagcactttgggaggccgaggtgggcagatcacttgaggttaggagttcgagcccagcctggccaacatggcgaaacttcatctctactaaaaatataaaaattaaccaggtgtggtggcgcatgcctgtggtcccagctacttgggtggctgaggcatgacaatagcttgaacccaggaggcggaggttttagtgagccatgatcacaccactgcactttagcctgggtgacagagcaagactttgtctcaaaaaaataaataaaaataaaagtaatgatatctgtatgagataaatattagtaaccagtggacctgtgtatgtttaaatggtcaaaatttatttcccgcctaagaaaaacctagcagggattttcccgacttttcttcccaccccagtcctgtcgcagtatccaaaagctagggcattgaggacttttataaactctcaagcatctgagaagcctaaagaaattcaggatttttgaaattgagtttgatgtctgattggccgtattacatatgagtcttcctttatgtcttattgctttttggcacacagtctagactgattgtgtcccaatctgtattttaaaacgttgcctcattaataatagtcattttatgctttctttactaaaggtagtgaaatattcattgaacatttaataagatattcctttatctatttcacctgatcattttaacgtattgatgattgccttatcaatggtggaaatgtctctggttctgttttttgttttttacagtaatcctacaggaaaattatttgttgtactagaaattattctgtaatatttacagaaataaagagttagtgcatacttttgattagcttcaacacttaagatgttaggaattgatacaccccttaaacatttacctaatgtgttcctagactggcagtttctttgtctgtttatttcagataaaacaatgaaacaatgaatgctgatttaagtagataaatttttttgtttatttacctttgttttatcacctggattgatacttacctgtaatttttttttttaaaaaaagagtcattcataaaaatggacatgtaaacacaataaaagtgtattacaaattccatacaaaatagtttttgaatggaaatagaattacatgtacctggcatctctgttccgtctgcattttaaatgtgcagtttcccctaactcagagagggagggaaagagagagagacagagaaggagaagaaagagctcctccttaactccagcttctcattcctctgaagtctggtttctgctcctacccttacatagaaattcttctcactaagatcagtagcagcctcatgtcactaaattcaagcccttatttcatttgatctctcagtagtagtcaacactgttgaccactcacttctggaaaaactttcctcgcttggattctaaaacaacaccctctggttttttttcacctctcccatctatagttctcagttgtcttttctttgaaatgttggtattctttgatactctgttctcttgtcactctctaaattccccatgggttattttatccatttagttattgtgtttaaatagcagactcctgaatagttatctcaattccactcttagctaaaaaaaactccagacatttctattctacttactggaaattcctacctcagtattcattgccacctcaaacttaacatccagaactcaatttttcttttgcaaacccattactttatcttcttttttgttaattttcctgttgatgcagtggtccaagccatgtatctcattcttcacgttaaattgaagcatgtgtgttctacttactaaatgtcatcctctttttaaaaaaatcatattacagaagaattttcctttttctggctccttttctaccattcacattgtagcccacttcaccaaggcttctgccaccataattccacttaaaagtgttcttgtcatcatcaccaaattacctccatattactaaattaattgatctagtctgttctttttcattactatttaatataattgaccactcctctatttcttccatccttctcttctctttgttgctttccctgcagtcatatccagcttaggcaggaattgagttatctctagttcaagccattactgtaaccaggcagcttaacttcaaaattcattttaaaacttttttttcctccttggttatcaagatataaccttgaggcacacattgtactcagctcaattattgtatgtcttccttatcaagttttccctttttaaatccctgccttcccctcaaaaattgaagtggttattttggataggaatctgaccccttccctttacttttggttaataaagtgtctgtctttctaccagaccttgtcgttgttaattggactctgcaaactgcaacgattcggacctgcatttggttacattacctttaccactggagtaacctcttgcctgaatactcagctcttctctacttgtttcccttcagtttgttctacagacagcagcagggataatattctttcagataaatttatcctgcgttcctgctttgatctctttcaaacttctctagattcatcctacattatttcatgctgctctcactgtgctgcttctctgctttagacattcttcccctggctcttaccacagccagtgcacactcttcagtctcatcttaaacatcatctcctcaaagaagcctattgaaaaccctctgtcaaggagactcacccagtcattacctttcctctctgtctcattgttatcacttgatctatattttatttattacataattgtttttgtctgactttaatacttgaatgtaagcacacagaaaagcagggacttttcttgttcattattgtatcccccacaatgtcccttacaactgcgcataatagattttcaataaatacatgtatttaaaatattagtactaacagacatatattagtactaatatagtgtgtatatatgtatagtgtacatatatatgtatgtatacatacacacacattggtttttgcctaatttttttgcaaaagttttcggaatacaaagccaacatagagttttgatttcaggttgtaagcttcttaaattcagagagtgataagtaaggtgaagtttcatttaggacccttagattttaatttttaaaaaaacatgtattttattatgaaactcagtctttagcagatagttttattttttaaatgtccatatagccttaaagaaatcgtaattacagaatgtaaccacctgttttgagggtaatgacttctaacagataattagaatagttttcaaataaatgaatgacttccatttaatagagataaaggttgcaactaggcagcataacttgtgctgttgaaataataaatgattaagtagctaatttagcacccagaatcactttctctgaacttgcattgatgagagtagacagtgcttgacacactgatgattgtgtaggaattggttgggtggggtccaggagcagaagtctgtaaagcagcctttcaaatgtaagcgcagcttcccacttgatctcagtagtcagatgtattctcttactttctgttttcttctgttctctattttcacctcaaatcaaattctgcatgctttctgcaaatgaaagttcattgtgcaccctttattctccaccaaaaacatgaagataaaatacaaatactttgtatattttgaaggaatggagaaatagcttcatataattaatcagtgttcccaccccaaaattaaaagagcacttattggaatgaactcttaatcaatgattataaaatcgggctgagtaatctttcatacagctgtaaaacatacatacttttggcagtgtcttaactaaaaaagccacaggtactttcctagaataaccttgatagttttacatgtgcacgtatttaaataagtctggaattttaattttttctgcaagcactgctttcaaagtaaaacactgtgttagtaatagtgaggttataagtataccagctataaaaggtccttttgtataaataatatatgaaacattttctcatacttcagttaaaattctgtgtctaattttgacttttcacatattatatggtgagttgaaatacatttgtagtctttgtaaactatttcagtccaaagagaattataatgaaataatttatttatgatagtctaatgtaacagaaatgagaaattatacaaggagaaaaactatagcaggaaggagaaccaagtaggtttgctcattaaatgaaacttaaatcctttatattctttataatgattcattaagaccaaataagatactacaaagagcaaatggaaaattttaaattacaagattatattccagttatctcttattttagaacccatcatcatcttgtgtttttccccctagctaagtaaatttctgaaccgtattttcttttcttactataatcatatatttttgggatgagttacatactcagccctctgtacccttgggcatctgctgatttagccaaccttggatcaaaaacatttagaaaagtattaatatgacaataaaaaataagataaattttggaaatacagtataacaattatttacatacaacatttatgttgtattaggtgttataagtaatctgtagatgatttaaagtatatgggaggaggtgtggaagttataagcatatactatggtcactttgtaaaagaaacatgaacatccgtggattttggtatggagggcatggggatttgaaaccagttcccccgaggatacctagggactacataatgcaatcacgtgttgctcaaggatggggatgcattctgagaaatgtgtcattagattttgtcattgtggaaacatcacagagtatacttacacaaacctactgcatacctaagctatatagtatagcctaatactcctaggctacaaacctgtatagcttgctactgtactgaaagccgtagccaattatagcacaatggtaagtattcgtgtatctaaatgtagaaaagctacagtaagaatacaatataaggttaaaaaaaaaatggtacacctttatagagcacttaccatgaatggtgcttgcagaattggaagttgtttgtggtgagttaatgagtggtgagtgaatatgaagacctaggtcattactgtatacttaggctatactaaatttatttgttaatagttctttgtttagtaataaattaaccttagcttaatgtaatttttttacttcattaactttaaaacttaagctttttgactcttttgtaataacacttagcttggctgggtgcggtggcttacatctataatcccagcactttgggaggtcaaggtgagtggatcacttgagctcaggagttcaagatcagccaagtcacatggtgaaacccccagctccacaaaaacttagtggagcatggtggtgcacacctgtagtcccagctgcctggaaggctgaggtgggaaattcacctgagcccaggaagtcgaggctgcagtgagccattattgcaccactgttctccaacctatggcttaggctgaagtacagtggctattcataggcacagtgttaacacactgcagcttcaaactcttgggctcaagcagtcctcctgcctcaacctcccaagttgctgggatacaagcacacaccactgtgcccagcttcctgaggttgtattacagttttttttttaattaatagaaggagtacactctaaaataatgattaaaaagtacagtaaatacataagccagtaacacagttgtttatcatatattgtatacagtatgtaattgtatgtgctatacttttattttattgtcaatgcagtaggtttgtgtacaccagaatgaccaaaaacttagaataatgtgtacaaagttactaataggcacaaagtctctaggtgataggaacttgtcagctctattataatcttatggcactgccatcatatatcatcatgaaatgtcattatctggcatgtgactgtatataagtgcattataataaatgtctatgtgtgttatatttctaaattctctctagccataaaacagttactattttgaagctcacattttgagtaattggacaatttgaatctcacattgtctagaaagattgatttgattgttaagatggtatgataagcatactctctggtttatggagtacattaatgagaaaaaagtaagaaagggaagattaactcacataattagtgaatgtgaacataaccatcttaagtacttagagtttattcttctatttcggttactttcctccctttaatagaaatggaatttctacttactacaccatacatatttgtagattattcattggtttagttattttctatcaaaactgtcaaatagaactgcagtattagttctagctacatttggctgttgagcacttgaaatgtagctggttctactgagaaagtaagttttagtttaattttatataacttaaataaccacatgtggctagtgactactgtactggacagcactattctaattttataaagtacaggttttgaattactgccaccacattattttgtttttcacaccaacaaaaactttgagatatcaactaaaactgagataaactaaaatctgttttaattagaaagcatgtttaaaggggaatattaagaaagattaaagttctcttttcactgttcctcacaattaaaaattagccttaaaaatgtactttaatctgtcctcaggctcctaccaccactgaggaaatgttaatatagacaattttatttctataaatggtgatatttttgatatcaccttgtcatttagcattgattttctatgaagagtcaagtattaattcatcttgttggcttaaagtatttgtatggtttttgttaccgacatttgacatttagctgcataaaaaataagatgtgtttgttttcttcttaatggctgtggagatagcatcatttggcttaacaactgaaataagagagacagattccctttatactgaaaaggccagaaggtcatttaagtaatcaaatttggcatcaccattggaacaaacatgtgcctcttcttttgatgtgatagaaaggaccatcacctttatagtatttgtgccaaaaacatttaatttgaacataataagaaaacatttagacaaattcagatgtgtggaacaatgtgcaaaacagctgtcctgaatgcttcaaatataacaatattatgaattgttttatataataggccagagacatggcaactaaatacaatgagtgacccactagtaaaaacttaataaatattcaggcccttttttaaacagttgggagatatctgaatataggatgcattgtatattatatcaatattaattttcttgagtgtgatataatgatattgtgtacataggaaaggttttgtttgtagaaggtagaggctgaagtttttaaaagtcaaatatcctgatgtttgaaacttaaagtggttcagcggtacagggggcagagagagagagagacaagaggcggtgtgtgtttggggtgtgggtaaagcaaatatggtgaaacatttacagttggtgagtctagaacaagtggtacaaggttattcattgtgctgttctttcagcttctttgcagactggatatttttttcaaagctaaaagggaaaaaggaaaaacagtaattgactgtaccctaattcctcattattaagcatactttttcagttatggcaatgcttcagaaatataaagacataccctcctttataaaggaaagaaaattattgcggaccccccccccccaagtaacctaaacttataacttaacatcataatgttattacaatatatataaaaatgtaaaggtgtagaccatcttcatatgcccctgtctcctaagtaactataactcagaacaaattctaattattaataaatgcaatatataaaatcaaaattcaaaataacaatatgatggcataataataacaataatcggattaactggtataattttgctgaaaataagtcaccactcaacataccaaactggttatgagtactccaatacagtttcttttgaagttgtcacatctatagaaacatctgtcatttgataactcactgtaaaaaccttcgtgcagtacgcaatttttagctactgtaaaacttttgtacagtacacaaggacataatttaacctttacttatatgcctttcacatattacaccccttttgtattaacatgagaatacgttagtatattattatatggtactatgttatttttataataccaaattattctcatcttatgaaataacttgagaaattatgtattaaaatgtttttgaattgtgaaatattagaatattgttactatttgacccaactcaaaatctccatgggaaaatacctgtcgatacccacagtattgttgaaaataatcagatgcagtatcacagctgtgtcagactctagtaccagttgggcaatcaaggcacagctaaaaattgaaaacaaagatctggacaacaaaacagccaaaggtgggggtcaagaagctctgacgtgtacctagctgtagaatgctatgcacatgtgccaggtgtagtgtgcatatccaggaaaaactgcagagagccccagtcttcacctctggttgaccatgagctctgtgtaagcaggaagtgaaggctaaggcagatttaagctctgaaagcattccacaacatacacacaaatcgtgcaaagcattaaggaaatcttgttactgctaagtgttgctgacccaggaacaactcctactcagctggacttaaaaataaaaacaaaaataaataaaaaactcattaaagatgtcagtggctccatgcagtaggaattacaggctgaacagatttagtcccagggaagtcattaaaccacaaacagcaacaccgccaatagcaaaaagctgagctggaagaaaaccaggaggaagaaccgagtccacagttgccacatagtattttccaaagtgtctgcttttcagtaaaaaaaggtatacacaaacaagaaaaattcttagtagaaattatcctagctatagggcttatatatttgtaattagttattacaaatatattcaaaaaaggtaattaaaccacaaagagttaaaggaaaatatgacaaatatactttatcaaatagagaatattaacaaaaagaaataaaaacaaataattctgttgttgaaagtatcataactaaacatgaaaaattcattagagaggttcatgagaaaatttgacctgtcaaaagaaagaatcaggaggagcaaagatggccgaataggaacagctccggtctacagctcccagcatgagcaacgcagaagatgggtgatttctgcatttccatctgaggtaccgggttcatctcactaggaagtgccagacagtgggtgcagatcagtgggtgcgtgcaccgtgcgcgagctgatgcagggcgaggcattgcctcacttgggaagcgcaaggggtcagggagttccctttccgagtcaaagaaaggggtgacggacgcacctggaaaatcgggtcactcccacccaaatactgcgcttttccgaccggcttaaaaaacggcgcaccacgagattatatcccgcacctggctccgagggtcctacgcccacggagtctccctgattgctagcagagcagtctgagatcaaactgcaaggcggcagcgaggctgggggaggggcgcccgccattacccaggcttgcttaggtaaacaaagcagccaggaagctggaactgggtggagcccaccacagctgaaggaggcctgcctgcctctgtaggctccacctctggggacagggcacacacaaacaaaaagacagcagtaacctctgcagacttaaatgtccctgtctgacagctttgaagagagcagtggttctcccagcacgcagctggagatctgagaacaggcagactgcctcctcaagtgggtccctgacccctgacccctgagcagcctaactgggagacaccccccagcaggggcacactgacatctcacacggcagggtattccaacagacctgcagctgagggtcctgtctgttagaaggaaaactaccaaacagaaaggacatccacaccaaaaacccatctgtacatcaccatcatcaaagaccaaaagtagataaaaccacaaagatgggaaaaaaacagaacagaaaaactggaaactctaaaaaccagagtgcctctcttcctccaaaggaacgcagttcctcaccagcaacggaacaaagctggatggagaatgactttgacgagctgagagaagaaggcttcagacgatcaaattactctgagctacgggaggacatgcaaaccaaaggcaaagaagttgaaaacattgaaaaaaatttagaagaatgtataactagaataaccaatatagagaagtgcttaaaggagctgatggagctgaaaaccaaggctcgagaactacgtgaagaatgcagaagcctcaggagccgatgcgatcaactggaagaaagggtatcagcgatggaagatgaatgaaatgaagcgagatgggaagtttagagaaaaaagaataaaaagaaatgagcaaagcctccaagaaatacgggactatgtgaaaagaccaaatctacatctgattggtatacctgaaagtgatggggagaatggaaccaagttggaaaacactctgcaggatattatccagtagaacttccccaatctagcaaggcaggccaacgttcagattcaggaaatacagagaacgccacaaagatactcctcgagaagagcaactccaagacacataattgtcagattcaccaaagttgaaatgaaggaaaaaatgttaagggcagccagagagaaaggtcgggttacctacaaagggaagaccatcagactaacagcggatctctcggcagaaaccctacaagccagaagagagtgggtgccaatattcaacattcttaaagaaaagaattttcaacccagaatttcatatcaagccaaactaagcttcgtaagcaaaggagaaataaaatactttacagaccagcaaatgctgagggattttgtcaccaccaggcctgccctaaaagagctcctgaaggaagcactaaacatgaaaaggaacaacccataccagccactgcaaaatcatgccaaattgtaaagcccatcgaggctaggaagaaactgcatcaactaacgagcaaaataaccagctaacatcataatgacaggatcaaattcacacataacaatattaactttaaatataaatagactaaatgctccaatgaaaagacacagactggcaaattggataaagagtcaagacccatcagtgtgctgtattcaggaaacccatctcacgtgcagagacacacataggctcaaaataaaaggatggaggaagatctaccaagcaaatggaaaacaaaaaaaggcaggggttgcaatcctagtctctgataaaacagactttaaaccaacaaagatcaaaacagacaaagaaggccattacataatggtaaagggatcaattcagcaggaagagctaactatcctaaatatatatgcacccaatacaagggcacccagactcataaagcaagtcctgagtgacctacaaagagacttagactcccacacattaataatgggagatttaacaccccactgtcaacattagacagatcaacgagacagaaagtcaacaaggatacccaggaattgaactcagctctgcaccaagcggacctaatagacatctacagaactctccaccccaaatcaacagaatatgcatgtttttcagcaccacaccacacctattccaaaattgaccacatagttggaagtaaagctctcagcaaatgtaaaagaacagagattataacaaactatctctcataccacagtgcaatcaaactagaactcaggattaagaatctcactcaaaaccgctcaacttcatggaaactgaacaacctgctcctgaatgactactgggtacataacgaaatgaaggcagaaataaagatgttctttgaaaacaacaagaacaaagacacaacataccagaatctctgggacacattcaaagcagtgtgtagagggaaatttatagcactaaatgcccacaagagaaagcaggaaagatccaaaattgacaccctaacatcacaattaaaagaactagaaaagcaagaccaaacacattcaaaagctagcagaaggcaaaaaataactaaaatcagagcagaactgaaggaaatagagacacaaaaaaccctacaaaaattaaggaatccaggagctggttttttgaaaggatcaacaaaattgatagaccactagcaagactaataaagaagaaaagagagaagaatcaaatagatgcaataaaaaatgataaacgggatatcaccaccgatcccacagaaatacaaactaccatcagagaatactacaaacacctctacacaaataaactagaaaatctagaaataaaggataaattcctcgacacatacaccctcccaagactaaaccaggaagaaattgaatctctgagtagaccaataacaggctctgaaattgtggcaagaatcaatagcttaccaaccaaaaagagtccaggaccagatggattcacagctgaattctaccagaggtacaaggaggaactggtaccattccttctgaaactattccaatcaatagaaaaagagggaatcctccctaactcattttatgaggccagcatcatgctgacaccaaagccgggcagagacacaaccaaaaaagagaattttagaccaatatccttgatgaacattgatgcaaaaatcctcaataaaatactggcaaaacgaatcccgcagcacatcaaaaagcttatccaccatgatcaagtgggcttcatccctgggatgcaaggctggttcaatacacacaaatcaataaatgtaatccagcatataaacagagccaaagacaaaaaccacatgattatctcaatagatgcagaaaaagccttcaacaaaatgcaacaacccttcatgctaaaaactctcaataaattaggtattgatgggacgtatttcaaaataataagaactatctatgacaaacccacagccattatcatactgaatgggcaaaaactggaagcattccctttgaaaactggcacaagacagggatgccctctctcaccattcctcttcaacatagtgttggaagttctggccagggcaattaggcaggagaaggaaataaagggtattcaattaggaaaagaggaagtcaaattgtccctgtttgcagatgacatgattgtatatctagaaaaccccatcgtctcagcccaaaatctccttaagctgataagcaacttcagcaaagtctcaggatacaaaatcaatgtacaaaaatcacaagcattcttacacaccaacaacagacaaacagagagccgaatcatgagtgaactcccattcacaattgcttcaaagagaataaaatacctaggaatccaacttacaagggatgtgaaggacctcttcaaggagaactacaaaccactgctcaaggaaataaaagaggatacaaacaaatggaagaacattccatgctcatgggttggaagaatcaatatcctgaaaatggccatactgcccagggtaatttacagattcaatgccatccccatcaagctaccaacgcctttcttcacagaattggaaaaaactactttcaagttcatatggaaccaaaaaagagcccacatcgccaagtcaatcctaagccaaaagaacaaagctggaggcatcacactacctgacttcaaactatactacaaggctacagtaaccaaaacagcatggtactggtaccaaaacagaaatatagatcaatggaacagaacagagccctcagaaataacgccacgtatctacaactatctgatctctgacaaacctgagaaaaacaagcaatggggaaaggattccctatttaataaatggtgctgggaaaactggctagccatatgtagaaagctgaaactggatcccttccttacaccttatacaaaaatcaattcaagatggattaaagacttacatgttagacctaaaaccataaaaaccctagaagaaaacctaggcaataccattcaggacataggcatgggcaaggacttcatgtctaaaacaccaaaagcaatggcaacaaaagccaaaattgacaaatgggatctaattaaactaaagagcttctgcacagcgaaagaaactaccatcagagtgaacaggcaacctacagaatgggagaaaatttttgcaacctactcatctgacaaagggctaatatccagaatctagaatgaactcaaacaaatttacaagaaaacaaccccatcaaaaagtgggcaaaggacatgaacagacacttctcaaaagaagacatttatgcagccaaaaaacacatgaaaaaatgctcatcatcactggccatcagaaaaatgcaaatcaaaaccacaatgagataccatctcacaccagttagaatggcaatcattaaaaactcaggaaacaacaggtgctggagaggatgtggagaaataggaacacttttacactgttggtgggactgtaaactagttcaaccattgtggaagtcagtgtggcgattcctcagggatctagaactagaaataccatttgacccagccatcccattactgagtatatacccaaaggactataaatcatgctgctataaagacacatgcacacgtatgtttattgtggcattattcacaatagcaaagacttggaaccaacccaaatgtccaacaatgatagactggattaagaaaatgtggcacatatacaccatggaatactatgcagccataaaaaatgatgagttcatgtcctttgtagggacatagatgaaattggaaatcatcattctcagtaaactatcacaagaacaaaaaaccaaacactgcatattctcactcataggtgggaattgaacaatgagatcacatggacacaggaaggggaatatcacgctctggggactgttgtggggtgggggggaaggggaagggatagcattgggagatatacctaatgctaggtgacgagttagtgggtgcagtacaccagcatggcacatgtatacatatgtaactaacctgcactatgtgcacatgtaccctaaaacttaaagtataataaaaataaataaataaataaaaactaaaaaagaaagaatcagtaaacttggagataggtcagttgtgattatccattgtaaagaatacaaagaaaaaagaataaaagaaaaaatgaacttcacaaacctggagacaccatcaagcatgccaacatttgtagatttccaaaagatgaggagagagaaagaggtagaaaatatttgtagaaatgatggccagtatttttgcaaattggatggaaaacatcaatccacacatccaaaaagctcaataaaccccaagtagataagatgtacacctaaactcatcatattgaaactcttgaaaggcgggaagagaatcttggaaatggcaatcaaaaagttgctcagcaagtaccagggatcctcattaagattaatgttaatatttctgatgacttctcgtcagaaatcattactgccagcaggcagtaggatatgtttaaagtattgaaaggaaaagattgtcaataaagaattttatattcagcaaaactattcatcaaaaatgaagggggaattaagatattcccagataaaccgagtgagttctttgtcaggagacctaccccataagaaataccagagagagttctgcaggccgaaataaagggatactagactgtaatgtaagtccacaaagtagtaaagagaactggttaagataatcatatcggtatataaaaagatagtttagatgaatttttttgtaaagaatttttattctgattttaccctttactcatttgccctgagaatacttgctggtggcacttgcggctgcagttgtttaccctgagataactttgccacgaaatatctcgcttttattattatttttacatcactgtagtatatcaactttggaaacaaaagacatcattctgtccatagcattctgtttttagtagtggtatttccatttacacaaacaaaaatcgagaaaatttgacagagaattactatactcaatcgctgaaaatgtcagatccttagaaaacatagcattcttatgcatgatgttaacatcgtactcaaatacttgatgcctagaggttcattcgatgaatccaggttttttgaaatagatgtttctgatgattcagacaattctgatgttaattctctttagaaataactcccaagaagagttttatattttattttcacagtaaaaatcagtcagatttgcagtagccttgaagagagtgttcatgtaaaattaaatgcgctttggtagtgagctgcacttccttttttctaaactggaaagggtttgaaagacaattgactaaaatagtaattctaaaattgttgatgaacatgtaacatagaaagatgtaatatgtatggccataatgtttcaaaggttggggaggaaaggagatggagctatattgcagcagaattttgacatagtattgaaattaaattagtgatcatctgaactaggttattttaatttaacatgccaattataatccccagaaaaaacactctgaaaaataacttttaaaatatactcaaactaaaatgatacactagaaaatatctgtataacacaaagtaaggtaataatggaggcataaaagagcaaatgacataacaaaaaaaaaagcaacattgcatgtaaaaattctaccatatacaggttgagaaccctttttccaaaatgctgagaaccagatgtgttttggatttcatttttttaaaaatatttacattgtagagtcatgcagtgtataatgacatttcaatcagtgagagaccacatatatgacagtggtcccataagattaaaatggaggtaaaaaattttaaacttctaatgttgtcatagccattataacttcatagtgcagacattactcacatgtttacagtgatactagtgtaaacaattctatgctcccagttaaataaaagtatagcacacctacagtgaactcatttttgacaaacttgccaagaacatacactggagaaaagacagtcttttcaataaatgccagtgggaaaactggatatccgtttgcagaagaatggaactagacctctgtctgtcaccatatatgaaaatcaagtcacaatggattaaagactttaagacttcaaactacaaaactactacaagaaaacactgggggaaatctccagtactttggtctaagcaaaaatttctttagtaatatcccacaagcagccaaagcaaaaatggacaaatgggatcatatcaagttaaaaagcttctgcacagcgaaggcaacagtcaacaaagtgcagagacaacccacagaatgggagaaaatatttgcaaactactcatctgacaagtgattaataaccagaatatataaggagctcagacaattttgtagggaaaaaaatctaataatccattttaaaatgggtaaaaggtttgaatagacatttctcaaaagaagacatataaatggcaaactggtatatgtaaaagtgctcaacatcattgatcatcagaaatgcaaatcatggctacaatgagatattatctcaccccagttaaaatgacttatccaaaagttaggcagtaaacaaatgctggtgaggatgtggagaaaagggaacccttgtacagtggtggtgggaatgtaaattggtacaaccactatgaagattggtttggagattcctaaaaaattaaaactagagctaccatattacccagcagtcccactgctgggtatatacccaacagaaaggcaacttctatatgaaagagctatctgcattcccatgttttttgcggcactgttcgcagtagccaagatttggaagcaaactttgtatccatcaacagatgaatgaataagggaaatgtggtacatatacaaaatggagtactattcagccattaaaaaaaagaatgagattctgtcatttgcaacaacatggatggaactggagatcattatgtaaagtgaaataagcctggcatagaaagacaaacgtcacggattctcacttatttgtgggatctaaaaatgaaaacaattgaactcatggacatagagagtagaaggatggttaccagagtctgagaagggtacttgggctgttgggggaagtagaggtggttaatggctacaaaaaatacacagaatgagtaagacctagtatttggtagcataacgaggtgactatagtcaataataatttaattgtacatttttatttttaattttttatttgctattagatgctacatttactttctcataccatcatgggttgaaaactgtccacaatgctcagttaagtcgctgatgtgttttaaaatggaaagacataaaacaaaatagagagtcatagaaacccatcagttgtgctctgctttgcaagtactggagcatatctttatcattaacatgagtggaattgagtgtgccatgtaatctgataaatcagtaccactcaatgaagttccattccattattgcttaacaggcactgaaatgaacacaaaatatttccaaatgattacctaggctttaccttatcctacctaggattaccttatgttttttgaatacaccaaaaatgtgtatgagggaagagaaatgagttccttccaaattttaattaacttacaccagaaaggtaaaatcatctctggactattgtacattatgaactatctgtgagtatcctaaatggatgtaataaccctggtactagatgaaagatttcataatttgcagaagtcctgaaatgctatatacagatttagtttttaaatatatttccattcacagaagataattattttttaacattttctgaatgcctgttaatccatggttctatttttttttcttttttttctctttttttaattttattattattatactttaagttttagggtacatgtgcacaatgtgcaggttagttacatatgtatacatgtgccatgctggtgtgctgcatccattaattcgtcatttagcattaggtatatctcctaaagctatccctcccctctccccccaccccacaacagtccccagagtgtgatgttccccttcctgtgtccatgtgttctcattgttcaattcccacctatgagtgagaatatgtggtgtttggttttttgttcttgtgatagtttactgagaatgatgatttccaatttcatccatgtccctacaaaggacatgaactcatcattttttatggctgcatagtattccatggtgtatatgtgccacattttctttttttttttttttttttttttttttaattatactctaagttttagggtacatgtgcacattgtgcaggttagttacatatggacttttgggttggctccaagtctttgctattgtaagtagtgccgcaataaacataatgtgtgcatgtgtctttatagcagcattatttatagtcctttgggtatatacccagtaatgggatggctgggtcaaatggtatttctagttctagatccctgaggaattgccacgctgactttcacaatggttgaactagtttacagtcccaccaacagtgtaaaagtgttcctatttctccacatcctctccagcacctgttgtttcctgagtttttaatgattgccattctaactggtgtgagatggtatctcattgtggttttgatttacatttctctgatagccagtgatgatgagcattttttcatgtgttttttggctgcataaatgtcttcttttgagaagtgtctgttcattcccttcgcccactttttcatggggttgtttgtttttttcttgtaaatttgtttgagttcattgtagattctggatattagccctttgtcagatgagtaggttgtgaaaattttctcccattttgtaggttgcctattcactctgatggtagtttcttttgctgtgcagaagctctttagtttaattagatcccatttgtcaattttggcttttgttgccattgcttttggtgttttagacatgaagtccttgcccatgcctatgtcctgaatggtattgcctaggttttcttctagggttttttggttttaggtctaacatttaagtctttaatccatcttgaattgatttttgtataaggtgtaaggaagggatccagtttcagctttctacatatggctagccagttttcccagcaccatttattaaatagggaatcctttccccattgcttgtttttgtcaggtttgtcaaagatcagatagttgtaggtacgcggcattatttctgaggactgtgttctgttccattgatctatatctctgttttggtaccagtaccatgctgttttggttactgtagccttgtagtatagtttgaagtcaggtagtgtgatgcctccagctttgttcttttggcttaggattgacttggcgatgtgggctcttttttggttccatatgaacttgaaagtagttttttccaattctgtgaagaaagtcattggtagcttgatggggatggcattgaatctataaattaccttgggcagtatggccattttcaggatattgattcttcctacccatgagcatggaatgttcttccatttgtttgtatcctcttttatttcactgagcagtggtttgtagttctccttgaagaggtccttcatgtcccttgtaagttggattcctagatattttattctctttgaagcagttgtgaatgggagttcactcatgatttggctctctgtttgtctgttattggtgtataagaatgcttgtgatttttgtacattgattttgtatcctgagactttgctgaagttgcttatcagcttaaggagattttgggctgagacgatggggttttctagatatacaatcatgtcatctgcaaacagggacaatttgacttcctcttttcctaattgaataccctttatttccttctcctgcctaattgccctggccagaacttccaacactatgttgaagaggagtggtgagagagggcatccctgtcttgtgccagttttcaaagggaatgcttccagtttttgcccattcagtatgatattggctgcgggttggtcatagatagctcttattattttgagatatatcccatcaaaacctaatttattgagagtttttagcacaaagggttgttgaattttgtcaaaggccttttctgcatctattgaggtaaccatgtggattttgtctttggttctgtttatatgctggattacatttattgatttgcctgttttgaaccagccttgcatcccagggatgaagcccacttgatcatggtggataagctttttgatgtgctgctggattcgttttgccagtattttattgaggatttttgcatcaatgttcatcaaggatattggtctaaaattctcttttttggttgtgtctctgccaggctttggtatcaggatgatgctggcctcataaaatgagttagggaggattctctctttttctgttgattggaatagtttcagaaggaatgataccagttcctccttgtacctctggtagaattcggctgtgaatccatctggtcctggactctttttggttggtaagctattgattcttgccacaatttcagagcctgttattggtctattcagagattcaatttcttcctggtttagtcttgggagggtgtatgtgtcgaggaatttatccatttgttctagattttcaagtttatttgtgtagaggtgtttgtagtattctctgatggtagtttgtatttctgtgggatcggtggtgatatcccgtttatcattttttattgcatctatttgattcttctctcttttcttctttattagtcttgctagtggtctatcaattttgttgatcctttcaaaaaaccagctcctggattcattaatttttttgaagggttttttgtgtctgtatttccttcagttctgctctgattttaattattttttgccttctgctagcttttgaatgtgtttggtcttgcttttctagttcttttaattgtgatgttagggtgtcaattttggatctttcctgctttgtcttgtgagcatttagtgctataaatttccctctacagactgctttgaatgtgtcccagagattctggtatgttgtgtctttgttcttgttgttttcaaagaacatctttatttctgccttcatttcgttatgtacccggtagtcattcaggagcaagttgttcactttccatgtagttgagcggtttttagtgagtttcttaatcctgagttctagtttgattgcgctgtggtctgagagacagtttgttataatttctgatcttttgcatttgctgaggagagctttacttccaactatgtggtcaattttggaataggtgttgtgtggtgctgaaaaaaatgtatattctattgatttggggtggagagttctgtagatgtccattaagtctgcttggtgcagagctgagttcaattcctggatatccttgttgactttctgtctcattgatctgtctaatgttgacagtggcgtgttaaagtctcccattattattgtgtgggagtctaagtctctttgtaggtcactcaggacttgctttatgaatctgggtgctcctgtattgggtgcatatatatttagcatagttagctcttcttgttgaattgatttctttaccattatgtaatggccttctttgtctgttttgatctttgttggtttaaagtctgttttatcagagactaggattgcaacccctgcctttttttgttttccatttgcttggtagatcttcctccatccttttattttgagcctatgtgtgtctctgcacgtgagacgggtttcctgaatacagcacactgatgggtcttgactctttatccagtttgccagtctgtgtcttttcattggagcatttagtccatttacctttaaagttaatattgttatgtgtgaatttgatcctgtcattatgatgttaactggttattttgctcgttagttgatgcagtttcttcctagcctcgatgggctttacaatttggcatgattttgcagtggctggtatgggttgttcctttccatgtttagtgcttccttcaggagctcttttagggcaggcctggtggtgacagattctctcagcatttgtttgtctgtaaagtattttatttctccttcacttatgaagcttagtttggctggatatgaaattctgggttgaaaattcttttctttaggaatgttgaatattggcccccactctcttctggcttgtagagtttctgcccagagatcccctcttagtctgatgggcttccctttgtggttaacccgacctttctctctggctgcccttaacattttttccttcatttcaactttggtgaatctgacaattatgtgtcttggagttgctcttctcgaggagtatctttgtggcgttctctatatttcctgaatctgaaagttggcctgccttgctagattggggaagttctcctggataatatcctgcagagtgttttccaacttggttccattctccccatcactttcaggtacaccaatcagacgtagatttggtcttttcacatagtcgcatatttcttggaggctttgctcatttctttttattcttttttctctaaacttcccttctcgcttcatttcattcatttcatcttccatcactgataccctttcttccagttcatctcatcggctcctgagggttctgcattcttcacgtagttctcgagccttggctttcagctccatcagctcctttaagcacttctctgtattggttattctagttatacattcgtctaaatttttttcaaagttttcaacttctttgcctttggtttaagtttcctcctgtagctcagagtagtttgatcatctgaaaccttcttctctcaactcgtcaaagccattctccatccagctttgttccgttgctggtgaggagctgcgttcctttggaggaggagaggcactctgctttttagagtttccagtttttctgctttgttttttccccatctttgtggttttatctacttttggtctttgatggtggtgatatacagatgggtttttggtgtggatgtcctttctgtttgttagttttccttctaacagacaggaccctcagctgcaggtctgttgtagtttgctagaggtccactccagaccctgtttgcctgggtcccagcagcggtggctgcagaacagcggcttttcgtgaaccgcaagtcctgttctctgatcgttcctctggaagttttgtctcagaggagtacccggcggtgtgaggtgtcagtttgcccctactgggtggtgcctcctagttaggctgcttgggggtcaggggtcagggacccacttgaggaggcagtctgcccgttctcagatctccagctgcatgctgggagaaccactgctctcttcaaagctgtcagacagggacatttaagtctgcagaggttactgctgtctttttgtctgtgcctgcccccagaggtggagcctacagaggcaggcaggcctccttgagctgtggtgggctccatccagttcgagcttcccagctgctttgtttacctaagcaagcctgggcaatggcaggtgcccctcccccagcctcgctgccgccttgcagtttgatctcagactgctgtgcttgcagtcagcgagactccgtgggcgtaggaccctccgagccaggtgcgggatataatctcctggtccgccattttttaagcctgtcggtaaagcgcagtattagggtgggagtgacccaattttccaggtgccgtctgtcactcctttctttgactaggaaagggaactccctgaccccttgcgcttcccgagtgaggcaatgcctcaccctgctttggctcgcgcacggtgcgctgcacccactctcctgcacccactgtctggcactccctagtgagatgaacctggtacctcagatggaaatgcaaaatcacccgtcttctgcgtcgctcactctgggagctgtagactggagctgttcctatttggccatcttgcctccacctcccattgtacatttttaaataactgaaaatgtataattagattgtaacacaaaggataaatgcttgaggtaggtgcgccattctccatgatgtgattattatgcattgcatgcctgtatcaaaacatctcatattccacataagtgtatataccaactataatactcaaaaaaaattaaaaatgttcaaaaagtctagcacatacgattacgtatactacacaatacttgataaagataataaataactatatacttgtttattatttactttttaccattattatagactgtacttcttacacttgtttttttaagttactatacaacagcctcaggcaggcccttcaggagacattccagaaaaaggtactgttatcagagaagatgacatctctatgcatatcattacccttgaagacttttcagtgagacaaaacgtggaggtgaaaacagtgatattgattatcctgaccctgtgtagacctaggctaactttctgtttcttagtttttaacaaaaaagtttaaaaagctttttcctattttaattttttaacttataaggaaatgtaaaaaggaaatacttttgtccagctgtacaatgtatgtgttttaagctaagtgttattacaagagtcaaaaagctttaaaaattttttaagtttataaagtcagaaaatcactgtaaggtaaggttgatttatttctgaagggagaacacttttttacagtaaatttagtgtagcctaggtatactgttaacgtcttaggccttcatgttcatttaccactcactaactcacccaaaacaattttcagtcctgcaaactccattcatcataagtcccctgtatgggtgtgtaccattttttaccttttatatcttatttttactgtagcttttctatatttagatacgtaaatatttaccattgttacagtttcctacagcattcagtacagtaacatgatacataggtttgtagcataggagcacaataggctattccacataacctaagtgtgtagtagtctataccatctaggtttgtgaaagtacactgtatgctcacacagtgatgaaattgctgaatgatacatttctcagaatgtatctccattgttaagtatgtattattgtacttactgttcagcatctcaaatccaaaatctgaaatgctccaatgaagaagcatttggagctttgattgaaatgttggcactccaaaagcaaggatttgggattttttgatttcagatgtgcaacctattaataattatattaaatgtaagtatgttgaatgttgtaacattcagggattggcagaatgggtttacaaaaaaaaaaaaattagaatccagctttatgctgtctacaagagatagactttagattcacagacacaaataggttaaagtaacaggatggaaaaagatataccatgtaagtagtagtcaagaaaaatggtagaatggctatatttaggtcgaacagaatatacttagagtagaaatcagtactagaaacaaagacattttataatggtaaaagaatcaatagtgaaaagatacatcaattatcaacacacctcaaaacaaactttttgtagatatatgaaaagaaaatctgtgatatttaagggaaaaacagatattttgactgaagttgttgaaaaatactccacttttgatatttcatagaaaaactggacagaaaattggcagagttttagaagacttgaataacattgtcaatctgacataacagacatccaaagaccacttcagccaacagtagaagcatgcacattcttctcaagcaagtgttagtaacagtctccaggggacaccatatttaagactaaaaataagtcaataaatttaaaatgcttgaagacatacaaaacagttttctgtcaataaatttaaaatgattgaagacatacaaaacagttttctgaccaaaatggaattaaattaaaaatcaacaatagttactttgagacatctgcaagtatttggaaattacatgacacattactaaataaccattagtcaaagaagaaataacaaaggaaatgtaaaaggattttaaactgaatgaaaatggaaacacatcatatcacaatttgtggtatcagccaaagcagtgttgatagagaattgtgtatccttaagtgtctgtctttaaaaagaataacaaagctaactgaagacaagcagaaggaaggaaataataaaggttagagtagaaattagtgatagagacagacaggaatagagactgcctgtgatggtggatgccaaatgagtgatcttatcggagtgcagaaatactctaaaactgatttatggtaatagttgaactgctggttaaatttagtaaagatcgttgaattgcatacaatatttttagtgtgtgtattttattatatgcaaaatatatctaaataatggttttttaaaacaaatatgggaaataagattatatagcattatgtttatccagatgtcccataatgtttatattaacatttttttcatgacatcattaaaacaaagattgatttttaagtttccagttattttgaccccttaatactctctttctagagccaatcttatatttgaaaaggattccttttcctttgttttctggctgttagagattagacatcatatgtgaaacttttaatgaaaaaaccaaaaaccagttaaaattaactttgctttccatttctgcatttactacatttatctaattttgttttgttttagatcactgtgtccactactatgatcttcgtaacactaaacagccaatcatggtattcaaaggacaccgtaaagcagtctcttatgcaaagtttgtgagtggtgaggaaattgtctctgcgtgagtattactctcctcagaggttgagcttaatacagagctctgtacttacctaccagcttgtaatgtcactgagggtgtatgtaaactataatattggagtatatgtactttttcttaaatagtagattttttttttaatcttgtccaattaaagtagtgtggtttctggtctgtattgtgcacttttatatgtgaattgtgggtaaaatcctgaagatactagttttttatataccctccccccttatctcatcctcctatgtttaattgcatttgaacttcagattagattttagctattgcttctaaagaagagataaacaacatagttgatgcaatagaatgagaagtattttatttattaaagtcaactcatgtgttactgtgtattttatctacttgcagtatagtagtagaattatttttggttttaaatattacttggttggcttttacactgacatggtcatttatctgtgatttcatggtgactttaaatatgttgaaaagaaaactttttttttttggcacagagtctcgctctgtcacccaggctggagtgcagtggtgtgatctccgctcactgcagcatctgccccccaggttcaagtgattctcctgcctcagcctcccaagtagctgggactacaggcacgtgctaccacgcccgactaatttttgtatttttagtagagacggtgttttgctatgttggccaggctggtctcgaactccagacctcaggtggtccacctgcctcggcctaccaaattgcttggaatacaagcgtgagccaccacgcctggccgacagatgaacgtgctaactcagtctggctccagagcctgcattcttaaccagcaaactgcattgcctctaattagtagtgatgagtttcgtgccaagaaattttaagtaagttcttactctttgtacttttcctcagctcaacagacagtcagctaaaactgtggaatgtagggaaaccatactgcctacgttccttcaagggtcatatcaatgaaaaaaactttgtaggcctggcttccaatggagattatatagcttgtggtaagtgaaaccatcgtttccaggaactttttaacaggtgtttgttattgaaattgaactcagtggaaatagaataaatactaagtcaagaaatggtctgtgcactcagaagatagtataatagacatgatgccccagcactactgattttccttgtgttgtactagaagagcattagtccttcccttttttattgtgtagaaaccctgaacacctcaaatacctgaacacctgatttttaactgttttatagttgttctccattataacataattctttagatattgtgtagaagacagaaaaggttaagttctgttagtaatatttccaattttggagacattatgtgtcttcttaagcttgatattcattttcccctatctgctgttctcttcatgaagtaatctgtttgcatagcattgatctgttattctatggcttttattgttgataatttatacaaatttaaataagaaatagaaaaatcaaatttgatattattcaaatgctctgatacatctaatgcctgaatagatgagctttgatcatacttttaaatgacttggcctttgttcagcaaagttgactttctccacatatgtatgagactgccaaagcaaatatctggaacaattattctatctttaatagatggctcaaaaataaaaatacagttcatagaccattaatagaataattcctatactgagaaatggaaataaattatgtaggctatgaaaatctgcctgtgtaagtgttgccactttcttttacctctctaaatggaaatcttcctaaatgtaatttaagattcttataatatatttctggttctactatagacttattaggctggtgcaaaagtaattaaaagtaatgacaaaacccacaattacttttgtaccaacctctataaatgattttatagggtaattttagccttagaattatcagtattgttgtatcatttaacactgattgtttctttagattagtaaagtatagcttttgtccaagaatccttttcttacatgatttctaattagtcctgtgatctagcctttcaaatttgcccataaaagatctttgaactataactttggctgataattactattagactgtgatgtcctaattccgagtttttctattctaaaatactattattattatttgttttcaggaagtgaaaataactctctctacctgtactataaaggactttctaagactttgctaacttttaagtttgatacagtcaaaagtgttctcgacaaagaccgaaaagaagatgatacaaatgaatttgttagtgctgtgtgctggagggcactaccagatggggtaagttttcatatcagttttttcaccttgggatctcatattatgcattatgtatacacagggtttgattaaattttaaaatataaattggtatgtggtatgtactttttaaaaaactttgtaatgtgtcaccaaagacaataggcattttaggtagtgattgaaatgcatagtaatagagcaatgtcatggtgtcataatgtccctctgtgacccatagcatttagtgcatatctcagttataaccattatcatattgtctgttcatatctcttctataagactggaaattcctccaaaatatgcattctgtctcattttctttattgattatgtgcagtataagcttgataaacattaagctgagctggtattttaatagggagggagaaaaagaattggtacaggtaaaggatagtggcctatatggtcctctaattaagtactatttcaaagtagaattgctgtctacaaaatacatttatatatgaatatttaagcatatttagtatattgatgagacagttatgctactgggttttataaagtggagttgcctcaaacttttcacttatgttttaaagtataaggtttttcataagttatatgaaaaaataattcttaggctaggttcggtggctcacacctgtaatcccagcactttgggaggccgaggcgggcaaatcacgaggtcaggagatcaagaccatcctggctaacacggtgaaaccctgtctctactaaaaatacaaaaaattagccaggcgtggtggcgggtgactgtagtcccagctactcgggaggctgagtcaggagaatggcatcaacccgcgaggcagagcttgcagtgagccaagatcgcgccactgcagtccagcctgggcgacagagtgagactctgtctcagaaaataataattcttgttactatcttgatttatataaacatgagttattagtatcatatttttaaaatagctttttaggtgattagttgggtttttgacaaaaaaaattctgacttgatatgtaatttaaaaatccaagtttcaggtatagtttcactttaatttgatatattctattgctgtcttatttaaagttctgtggctccatttccagttttgctaattgacagactaggtaatttggaccaacccttcctccaagtaaaattagaaaaaaaggaccaaatgtatgtatttttaaaaaaagaacctatttgaaagcattggaaagcaaacaagacaggaaagaattaccagatttggattgtgaccctggcttttgaatctacttttcccctgtgagcatttgtcagttctggtggggtgggtgaaagtgcttatactagcttcacagggttgcagggattggagctcagtgcctgacgttgtatgggtgattactttgttttaagtccccacaggggtatattataggggaaaccagaagataagtcttcatagcgattgcatctgaacttcatatcaatctctgaaattgaattgaggtgacccttgattgctaatatccacaggatgcaaacttaaatcctctgaaaaaagataagatcatctaagtgctttattttttttagttttgtaactacaataactagggcacaataaaaaataaacagacatagtaaaagagaagacagcatgaattaaaccagcctaagcaacagactgtagaaacagtcacagcagctctaaatattgaaattatcagacagcttgaaagtagctatgcttacaagatgaaagacaagattgaaaattttaactgagaactggaaactatttttagaatgaaaatatcattctgcttctggcccctcccaaatttcatgtcctcacatttcaaaactgatcatgccttcccagcagtctcccaaagtcttaactcatttaagcattaactcagaagtccaaagtccaacgtttcatctgagataagccaagtcccttctgcctatgagtctgtaaaatcatcagcaaatcagttaattcctagatatgaagagaatataggcattgggtaaatagagctattcaaaatgggagaaattggccaaaacaaaactacaggccccatgtaagtccaaaatccaacagggcagtcaaatcttaaagttccaaaatgatctcctttgactccatgtctcacacccaggtcacactgatgcaagaggtgggttcccgtagtcttggagacctccaccactgtggcgttgcagggtacagcttccctcctggctgctttaacgagctggcattgtctgtggcttttccaggtgaacggtgcaagctgtcagtggatctaccattttggggtctggcggatggtggccctcttctcacagccccataggtggtgccccagtagggactctgtgtgagggctcccaccccacatttcccttctgtactgccgtggcagaggttctccatgaggggcccacccttgcagcaaacttctgcctggatagccaggcgtttccatacatcctctgaaatctaggcaaaggtttccaaacctcagttctttatttctgtgcacacgcaggctcaacaccacatggaagctgccaaggctttgggcttgcaccctctgaagccatggctcgagttctctgttggccccttttagtcatggctggagcggcagggacacaggacaccaagtccctaggctgcacgcagcatgccaaccctggacctggcccaggaaacaactttttcctctggggtctccaggcctgtgatgggaggggttgctctgaagacctcttgacatatcctggagacattttccccgtggtcttggggattaacattcagctccatgttacttatgcaaatttctgcagccagcttgaatttcttcccagaaaatgggattttcttttctattgcattgtcaggctgcaaattttttgaactttgatgctctgtttcccttattaaactgaatgcctttaacagcattcaggtcacctcttgtatgctttgctgcttagaaatttattctaccagataccctaactcatctctctcaaggacagagttccacagatctctagggcaggggcaaaatgccgccagtctctttgctaaaacataacaagagtcttctttgctctatttcccagcaagttcctcatctccatctgagaccacctcagccttagatttcatgtccatcattatcagcattttggtcaaagccattgaacaagtctctagggagttccaaattttcccacattttcctgtcttctgaaccctctaaactgttccaacctctgcctgttaaccagttccaaagtcagttccacattttggggtatcttttcagcagcaccccacttctggtaccaattttctgtattagtccattttcacactgctgataaagatatactcaagactgggtaatttacaaaagaaagaggtttattggactcgcagttccacatggctagggaggcttcacaatcatggcggaaggtgaaaggcatgtctcacatgacagcagaaaagagaagaaaacttgtacagggaatctcccctttttaaaaccatcagatatcatgagacttattcactgtcacgagaacagttcgggaaagacttgcccccatgagtcatttacctcccactgggtcccttccacaacatatgggaattcaagttgagatttggatggggacacacccaaaccatatcagaggagtctttttcattcctttaagccatcagtttcttttcttttcgacaaataataattgtaagtatttatggggtacaatgtggtattttcatatacatgtacattatggaatgattaaatcaaactaatgagcatatcggtcatctcacatgctttttttgtagtgggaacatttaaaatcttattctcttaacaatattgaaatatccactacattattattaactacagtcactctgctatgcaatacatctcaaaaacttactctttttgtctaattagctgaaactttgtagccttggaccaacatcttggcatcctcccactcccatcccccacctctggtaactaccattctattctctatttctctgagttcaattttttaagattacacgtataaatgagatcatgcagtatttctttctgtgtgtgatttattttacttagcataatgtcctccaagttcatgtaaagctgaatggtattccattatatacagtttaaccttgacaacgtgggggcaagaggcactgaccctccactcagttgaaaattcgggtataatttgattccctgactcaaaagcttaactactaatagcctactgttgactgaaaatcttaccaataacataaacaattaacccacataagctagacaaaagaaaatattattaagaaaatcataaaagaaaatatatttactgtttattaaatgaagtgaatcataaaggtcttcatcctcatcttcacatggagtaggctgagaaggaggagaaagaagtggggttggtctttctctggagtggtagaagaggaagaaaatttgcatataagtggttcctcacagttcaaacctgtgttttccaagggtcagctgtataccatgttttcttatccatttatttgttgatgggcacttaggttgatttcatatctttgctgttgtgaataatgcaatgaataaaagagtgtgcatgtttttttctgtaacctaattttaactcttttgaaattgaagtgggattcaatgctcagaagtgtaattgctaggtcatattgccattctgtatttagtatttgaggacctccatattattttccataaaagctgtactgatttacattcccaccaacgttacaagagttctcttttctccacattcttgccaacgcttgttatctttcatctttttttaacacaccccacttcacagatgtcatttgtctttttgatgatagaaattctagcagttgtgaggcgatacctcattgtggttttaatttaaacttccctgatgattaatgatattgagcattttttcatatacctgtttgttatttgtatgtctttttttgagaaatgtttattcaggttctttgcttgttttttaagtgggttatttgttttcttgctgtttaggtgttggagttccttataaccccctaactgataaatagtttgcaaatattttctcccaatccacatgttgtcttttcactctgttgtttcctttgttgtgaggaagctttatattgatagtttgatgcattcatgcttgtctgtttttgcttttgcagttttagccaaaaaatttttcagaccattatggagcttttaccttatgttttctagtagttttacagttttcagtcttatgtttaagcctctaatcattttgagttgagtgttgtatatggtgtgagatactcaacttcattcttctgcatatggatatccagttttcccaacaccatttattgaagagactatcttttcccccagagagattcttttttcttcctccctggcttccccagagagattcttgaaagaaggcagagagaaaatattgtcagttagactgacagccaacttctcaatgaaatagtggaagccaacagacagtgaaaccagatagtgtgggaaggaaaacatttgcaaaccatgaattctacatccagtgaaaatctctagacagtggtaaaataaagacattttaaaataaataaacctgaaaaattttcaatcagcaaacctacactaaagaaaaccttagaggatatgcttagggcagaaagaaaaagattccagatgaaagtcttatcttttttattaacattgatttatctagagactggagttaggtaagggaacgtatatatattctgtatctgtggatctgtgatatgactcttatctgaaactattggaatgaaatatgaagtgttttaagtatacaaatgaatatatttgttcctatgtgatgatgcctgtgtaaagggacacaatatttttgttaggggtagaccctgagtccatagtaacttcttttgaggctgcagataccctattattgttttgtcagctctgaaccgtaacatacgtacttagctactcaccaatcctaagtggatagctaatagtaaaaggcagtacttgtaaaggacacttattactcctttagctcttcagaagtgaccccaaaaagtacactctatcctcaggcaaaaaaaaaagcagtggtcattagggtggacattttctgttgtggcttgagacatcaggaatcatattaaaagtttctgtagctttagggttaggggaggcagggatcaggataacagatttccaaatttcccctctctgaaaccaagtgcagcaaaacttggcttgggaacctatcaactatgctgtaatactttctatgcagttataactgtgcacctttgttttcagttacatcattaaattttattctctctaatttctaacaaaacttttttgttatatgatgaaatactattctgaaacattgaactaaactgtgttcttaagcagatgttttgcttacctaagtttcttctgattcttggcctttaaaaatacttgctgaatgaattaatatactgtcttgtattgtatttgtgttcatgtaacctccagactcctcaaaaaaagacatcatagtattttgagtaagagcagagccaggctacctaggttgaaatctctcagattccccactgatcagctgtgtgaccttgctgaatttccttaaccacacggtgcttcagtgtcctcatctctaaagtgcccataataatagccacttatcttctagggttgttataatgttaaaatgtggtgatgcacataaagtgtttggaacagttcctgatacacagcaaaagcgatacatgtttgctattagtattatatttttaattacccctagcattacacagcgtgtttgtacataatgcataattaatatataatttttgtaatgaacgatacaacacttcaagcttggcctttatcttttctgttgcataattaaatggtaattaattggaatcaaagaaatgctgaagtggagttgggagatacttctaatatctaataggctcacttgaaactaaatggtaataatcaattaccatttaagaaaagcagttttgctgacatgaaccattcatatgtacatataattacttcaaaaataccattttgccccttgggatataatctccagcccattttgtctattttcaaaagcaacaaaaatttttaaatgtgtgcagctacaagaaagtaggcgtttattattggcttaatatttttattacatttatattatgttctcccttcccttctccatcacgttatgacatttcacaactcagtcttttttttttttaaaggcatatctactttccaaatttatgtgagttttatctaaggaatcccttgcttcttagtaacattttcttggggtatgtaaaacatcagatttcagtaaactagaaaagtaaagcacatttgagaagccatgcaatactgtattccagtctgctttcattaaagtataaaagatgtctataataaaatttatttataccagtggttctcaaaactgactgataatcagaaaaccctggggctctttcaaaaacaattaacaaaacaattctatttttagacccatgaatacatattttgggggaggaaggaggagggtatagatctgtattttgaaaagttccccaggtctccttgggaaattatatgaacaatcatgtttgggaacaaatgaatcatgttaccactgggaagaagtttgttatacatcctaaccaagaaacctaaatggttcttaagcatctgctagcagaaacagttataattatgaatacctaatgtctgttagattttgctgatccctcacctacctcaggaagaaacaaatccaaaaaagtaagatacggtcttttttatttgtgttaattaaaaaatgctactcctaaaaatatactaactttccacacttataaaggtgtttcttattttaaattcctcaatgagtgcggagaagacaacatagaagcttcttctctttctttctgtcttccttcaactctgtttctcttcttccttttatctttcctttcttttcttctttcctctgactggattgtttataacactttagaaaatttccctgactggaagagggccaatctgaatgagcttttgtctgtcttgggagtagaatgaaagcagattctgagcatggaccctgacttccagaaagactcccatctcctcctcagtgcctcactcttccctcagtatccagaatagagtggggtggggaagtagaaaaggaaggaaataagaaggtggtagaaaactgaggcaaccctagtaatttgtttttctctaagtaaattacaggaagtatacattttctttaaccttaatgtccactactgtgtggacagcctctgggaaaacatctgttgcattagatactttatggtgaatattataataaaatcaacaaaatatgatttatgaggtctgctagttgacattttaaatttttcattattatcatttttatatttctgtaatagagtttgacctacattagaatgattcttaacttttcttcctcattaaatccttttttaaaaagagtgttctgtgtatgccaatcttgaagcatagaattgatgccaatttttaagctacttgctgtttttggttttagtcctgccttttttaagggaagaaaagaaataatattaatttgagagtgtattatgaattatgccattatcctaacagtaacttttattgtaatctcaccatgctaaaaagtatccaaaatattttgagatgggaagggatttgagtttggtttctaatgtttatcttttggtaatccctaccaaattttcatagtaatagtagaaagaaggaaagtgaatattggatattatttcctttacttaaaagcttttgatggatactatttgaattggtgtaatatgctgaagtgtatgtaatggaaaaacattattattttctaaattgaataaaatggatttaataaatactgaaagcagaattaactaagcaaaaataagtatgttttgcttagaaaatggatggcagttgcttaagaaaaaaggtttttttactaatttaagaatatacagattgtctggggaaaagaaacttttttttgtattttacttgtacagtctcacatataaccactgttgttctcatgacactctcctatattgatgtgatctttatatgatttgtaccttttttatctcttattccattatttcttaaattctattttattcaccagtttcccaaataaagctatcagggttgacatcagctatttccaggaaaataaaaaggttattactgctgaacactggaataatttgattatgtagattgaagaaaagtcaatctgttataattgctgtaaagaagccatttaattttgtgcctgtttgcattagtctttttttaactagatatgcagattagtgggatgaaaatatatattctttatttgaattgtgattgccaactgaaagatgaatatgagggcagaaaatgaatctaaatctttggtttaaatgataaagtctttacacattgtagagaattaaataagcagttggtcatacttttatttatcttcaggatcttttgctctctgataaaagtagaaagctttagggaatagattgtgtagaaagtaaatccgacttcaagattcagttcctttttgataatttattgttttaaatcctaaatatctgaagcagtaatgccatgactcaccaaacatatctttgtgaaatgatttccagagattgggagaaaaaaatactaatagttgattttgctttaagtgttttttatttctcacaacattccaaatgtttgttttaggagatacaagagtttatcattttttcttttaattgctaagaagacttgttacaactttcaaaaaaagtcctcatggaacctgataaataagaagttcaatgtcttatttcattacgagctatctaaatatttttgtcagattcagaatatgtaactgaatgtatgtaattcttttttgtagcagccaagaataatttaagtttcacaactaatactgatatgcctttatcatatttttgctaaccagccaaatctgtattcccatgatcatccttaatgtttgtactagtagaggactatagtggtgcaaactgaaccaaaatagcaactaataagaaggaataaatgaggccgggcacagtggctcaagcctgtaattccagcactttgggaaactgaggtgggaggatcacttgaggccaggagtttgagaccagcctgcccaacatgttgaaaccccgtctacactaaaaatacaataattaggcaggcatggtgttgcacacctgtaatcccagctgcttaagaggctgaggcaggagaatcacttgaacccgggaggtgtaggttgcagtgagcagagattgcaccaccacattccagcctgggcaacagagcaagactctgtctaaaaaaaaaaaaaaaaaaaaaaaaaagaatgactaattgatatagagacttatatgggtatttgcatttaaaaatagttttatattctgaacagaataaaatagttatacctttcccaattaacaaattagccttgcaacttcagagttcaataagagtccctgtttattaccaatattcttattttctcaaagttttttgttttgtaaaggattgagacctttgagaccttctaattctacatcttttacatattactggatttttgagatctgacaactgattttccctttactaatagaaagcatgaaatgtcattgatagcaaaacaaattctaagatcccttatggagatctcactgttcttactggtagggaaagcccaattatcatgtagactttacattctccatcagagtatctactgtgttaaaacaggttcctaatcatcttagaatagagaaaaccatttattttatccagtacatgattgtcctttatgcattaaattcatgtttttacatacttgtgtttccttttcattttgtccttccaaatcattattttaggaatatagagaaaagggttggccaggtgcagtgactcacacctgtaatcccagcactttgggaggtcgaggtgggtggatcacttgaggctaggatttcaagaccagcctaaccaacatgcaacaccctgtctctactaaaaatacaaaaagtagcctggcatattggcgcatgcttataatcccagctactgagatggctgagacatgagaatcgcttgaacccaggaggcagagattgcagtgagccgagatcgtggcactgcactccagcctgggtgacaaagtgtgaaaccctgtctcaaaaaaaagagaaaaggatcatttttcaagagtaataacttcgggatggttgtgggttctggcttttggttttttgttagtctttgtttaaatgccatattaactccaaactcacacatctaatgtaactaatggtggtgggagtggggaaggttttggggtgggggataatattagtaaattgtttaaaggtatatttatcctatcaaatgaaatctatcaaaagcataggtaacttagaagcttttatatatcctatgtattttagatacagagatttgcatcaaccagagttactaagaatgaaactgttggctctgaataggtgtgaataaatccttaggaagagatttcctacctgccctttaggtgccatgtttcttactgacagctgtcaatattttttaaaaatgagcatgagattttggttctttgcatgaattgcatttgaattatgcaattttggggggttttctttgtgggttttttttttttttttttttgagacagggtcttggtctgtcacctaggctgtagtgcagtgcagccatggctcattgcagccttgaccacccatattggtcagactggtctcaaactcctgacctcaggtgatccacctgcctcagccttccaaagtgctgagattacaggcctgagccaccatgcctggcccacgtattctttccttaactgtttgaagactgctgatcatagcatcaaaagcgttttttatttctgttactatgtttgtatatttctaggatttctctttgattctttctcataatctcttcactgaaattacctattcgatcttaaacgttttatatcttttccatcaacccctttaaccatattaatcattgttattttatttcatacagttttaacatttgaactgagtgtcgtacctgagtctggtttaatgattgctttgtctcctcagattctgtttttccctgaatgcctgtaatttttggagttgctatagaaattcaaacaatgtagtctattgcattgacttactatcacatgaaaaatattggattaaatttctaaaattttaagcacagtcctatcctttggcatttcataaatttaaagactttggatcttacaaatgcaaaaccagtatgtatgtatctaaccagtggtatgtgtctaagcacaaacttaatcttgtttttcctttaatatatattgaatccatccttatttccaaccctgtgactctaccacctgcctttagttcaagctcctgccatttagtttagtttatgtcctgccattacttcttaatagttctagacttgtttatctcactgtttaaaatctgttagtgtttccccaatggttacagaataagatctaaactttatgtgacatctaacaaccttctttatcaggcccccacctccctctccagctcaatctcttaccacttgcataagcacattttacactccagcaacatgaactgcctgtaggatcctcaaacaccgaatgctgggttttttgtttgcttgttttcatctttgtgctgtagatcttgctgctcactgttcccaaataccctttcctgcacttctgtttgttacatatgataatgccattatactggaactttgcacaatgctgagttttgtagccacaaaaatattagagtgttcattgggtagataaataccattagattgatctagacttacttttttccattgtagaaattatgtatatcacatctctaatgggggtgtttttcaaagttatttgaacatttccagtggtagggagctcctgctttacaaggcaaccattatatttttcaaaaactcttaagtcttacaaagttatctcataagaacagccctaatttcttctttccaccactttgtaaacagtaatatactttaaaatgtgtaacatttagcaacttgtagctctgcatgcagtaaaattcaacattttctgaattaatttttactgtgttatgctgacttcatgtattttattttcatgggctggtttaaaaatacgagaatggaaagatgaaagaaaagattagtacatgcaaactatagaagtttaggtagcaacccagtcctgagtttcccatttcatcttcttttattttaaattctcaatgtatttccatttgcaaagttaactcttttactaaactgtcatgagacatttgtgtaattcagactccagtactgattatagtatcttttaaccaaatacatttcactaaaaattagacttgtaaaagtgttaaaaaaataaggcttggccagatggggtggttcacgcctgtaatctcagcactttggaaggctgaggcgggcagatcccctgagtttgggagtttgagaccagcctgaccaacatggagaaaccccatctctactgaaaatacaaaattacccgggtgtggtggcgcatgcctgtaatctcagctactcgggaggctgaggcaaaagaattgcttgaatctgggaggcggaggttgtggtgagccaagatcgtgccattgcactccagcctgggcaacaagagcgaaactccgtctcaaaaaattaaataaataaggcttatgtgcagttattctcaatgagctaaaaagcttcctgaggctagaaattcttgtcatttttggctgggagcagtggcttacacctgtagtttcagcattttgggaggtcgaggcgggcagatcacctgaggtcagggatttgagaccagcctggccaacatggtgaaaccccgtctctactaaaaaatacaaaaattagccgggcatggccgtgggcgcctgtaatcccagctactcgggaagctgaggcaggagaatcgcttgaacccgggaggtggcagttgcagtgagccgagatcacaccactgcactccattctggcaacacagccagactctgtctcaaaaaaaaaaaaaaaaaaaaaattcttgtattttgtatattgctgctctctgggcctcagatggtatgtgttaagtaggtattcggtaaattctttcctcctcacttccctctcactagccacctgaccaaaagcagaaaaatacgtcttggttttccctctgagttcaatatttgtagatagtttcaacatgtgtattagtatttttcaaagtatggtctgttgatcacctgctttagaattattagttacttgggataggaattaaaattttaaatatctaaaccctatacttgttatatttagactttctgaaggtgaggaccaagaaccaccttttgtatttgttgttgttgttgttgttgttatgggttacataattctctccttttgttttgttaagtatcctagaattgcatgggagaagcaaagatcccatctctgtcacatccaatcttggagccaccggtggaaatttagaagtgccaaagtgtttccaacagtcgctgccgcaaacctattctttctttacaggagtgattaggtactgtctcaaaccctcctgagtgccacatcaggaggctctctatggtctgttggtcactttggaagatgtagagactaaatccaagggagacattagataataagccagggttctcatcagtctcctcagtagcaaaagcaaaggctagaacattctggtagtgctcattattaattggaacattacagctggagtcaaagatctgcctcctgaaaggtactgtgttctgatgtttacagccaaattccattaaacattgactgatttattacaatggatacaactcagaaatagctcatgggaagagatgcatagggcaaggtattggagagtggcgggtggagtacacagaataggtctgtgctggtgactcttggaaacactttggcattttcttcccagatgggtaccctcctagtacctcaatgttttcaccaacctggaggccctggaacctccattttcaacaaactccctttgggatttatatataataaaatgctataaaatatcagtttttgagctcttttctgtttgtatatttgcttaataagaatttgctaaatgaataaattttatctgattaagttttcaaggacccaaatgaccaaaataagaacttactgtaagactcaaaatataacaaatgaggttaatttaaatcaggcagtgagtttttggagaatatgttctgtacaacaaaaaaaaagttactacaaaatacccttccaactttgacatattaacatccttatttccttctggctttatcagtctttctaagtcatttaagtctaaaaccccagaatcattattgttgcatctctttattttccatctaattattcatcaaatagcagtaatgctttctttgaaatgtcttctatatatctttgttttcgtttctgcttttcatctcctcatttctgttccttccccttccccttctctcgatttacttctaacagctttatgtccctttcagtcggcctttatgcactaccaaatattcatctttatacagagataatcaatcaaacattgcttgttacctttagttgacccaggtctttcagaaaagtttttttcaaattcagcatttgcatgtacctctatctggtatattttggccaacactaaaaataaggggaaattttgataaatatattacctgaacttgttagttatttaatctatttcacttcagatatctgtatctaattttaaaattatatttacccttactattaaatatgatccttaagaaaattataggaaaaagtacaatagaaaaaaatactcaaaggtaactcagatttcaaaatttactagtatttagaaaattagcctttataataagtatagaacaatgtcgttcctatatctacttcttaactgctctatttcctgatctcatgtgtttgcacttagactatcgtatctaaactattacattcaagattttcaataatctaatataatgctatccatctaactttatttctgttttctaacacagttcacctacttcattaagaaagtttcttcattgtcccatactattcccattccggcttctaaactcgtattcatgttgttcttcatattgccttatcctcttatttctgcttaactaagttctcatcattttttagcccaatcactgcttctctttccctcttttaaccattttatctccttggtttctggtttctcacagctattgatgaacctatagaatgcagtctaccaactgatgttcacattcatcttgaattgtttgttatgcttcattagtgttgccccaggtacattccttgcttcaacttggagagcaaaaaaatacaaacaccagcagctaccagagtaagagctacttagttttctaggaaagaggagttaaagattgagtgagaataaaatttaagtctgcctaacccagagagcctacttttatcaatttcataagatcataaatatactgactagaataatacactagtattattactactagtacactgtgatactgacagtactaatatgatactaatagtactatcattgcttgagataactaccctttaactgtaaagaaattaaggttatatagtattttagtaaaagcaactaccattcatttgtttagtgcctatagtgtgccagttactctttggttacatgctgtaagggagaaaagatttttctcacctgttggcttgattcatgacggagacctctgtaagttttacatgacatagaagttttacgtgacacagaaggcttcagaaatgaagacccaaagaatgggtaaacttgtatatgtttatgcttaggtttgatgaagaaatgaatagtctcatggagaagtatgattggaggacaaaggggtatgatctaatggtaataaactgggggcaacttagcaagacctgtttgttgagcttcttctctgtgtctctgtctccagagataagggcattcctttcctcaggtaaggataggcaactctggaatgagagtcttatgacctgcttcagtggaagggcagagaattcttttatgacctgcttcagaggagaagtgtgggagaaggtcttcctgcttctgctgttttttcaaataccaaggtgactatttggaggtagtgtgttctggtccctaacaatgctctactgtgttttccttgaatcttcatacagattctacctaagagtatctgctttatatttggagaaattgaatgtctaaaaggattaagcagaaccaaaattcagatccaggtttccatgccttgaatgtattgctttttctgttaacatggtattccccaaatagtactgaattctagaatcagctttaccagagtagtctggaggaaatttgcgaatagctctcttaaatatgcacggttctatgctcagaggagctcttctcagtattaatcagcaatccagtcatttttttcccctcatacttgtcattgtaagcacatttttctcaagctttactcagaagatcatccagagatattaactgttaacatgtgctgcaagttgaaagtgtttagagagaatatttgagtgcagtgtgacaaggataatcaagttgtttagggccagttggcgagaagactttggaaagcattgagaaaggaatgatgaatgtatgtgttgttttgtatctaaatccttcttcccttgtgtatgttcttcacagccttttctccctgaataaggatcactttgactttgtatgctaagtgtgccttcttaatggttcttttcctgttatctgaatcctgaagtatatttaaatgagaatttgatgcagttagttaattggaatataaaagactggttaacaaaagtcttcttaataatgaagcacaccagaaatggaagctgctggaaccagccatgtggacaaatgaaaaaatgccttttgtctacagattgcagcgatcctacataaatatatggaggtctctgtctggcttaggacagctggctaagtctgatcgttcccctccgtacagcctttaaaactgccactctaaatacttggtttccttgccattttattcagtatctgctggttatgagtactgtattattttttaaatgggcaaccaagtaaagttacctctgtatccgtctgaactggtttttgaggtatcttacgagttttgaaaataggtgttatttgcttatttaaggaacctacaaccaggaagtagaatgaatgtggaaatattattcttctcttgccgagcatggtggctcacacctgtaatcccagcactttgggaggttgaggcagatggatcactgaatgtcaggagttcaagaccagcctggcaccaacatagtgaaatcctgtctctactgaaaacacaaaaattagccaggtgtgttggcaggcgcctgtaatcccagctacttgagaggctgagacaggagaatcacatgaacctgggaggcgaaggttgcagtgagctgcgattgtgccattgcactctaggctaggtgacggtgcgagactccatctcaaaaaaaaaagaaaaaagaaatattattcttctaaggggccacattggcttaacgaattcagggttaccagtgaaggtcaatactttagatatgaaggagctaatcagagatagcttccgtgaagattttctcattaagaaagtgatttctccaaaatccagtttatgtaattttttaaggctgtaaccaaagttcagaaataaccatttgcagaggaaagctgctgctaagtattaaccttcttagtactgaattcaaaatcttggtttttcctgttgtgtgttttgctgttaagttgtggggagaggttgctcccacctacctcccctaacttctacaacttacagcagccacagctgggtttgtttgtttgtttgtttgtttgtttgtttgttttttgagactgagtctcactgtgtcacccaggttggagtgcagtggcataatctcagctcactgcaacccctgcctcctgggttcaagcaattctcatgcctcagcctcctgagtagctggaattacaggggaccaccatgcctggctaatttttgtatttttagtagagatgagctttcaacggcgcggtggctcacgccagtagtcccatcactttgggaggctgaggcgggtggatcacctgaggtcaggagtttaataccagcctgggtttatttataactaattgtatgaggatccttgtttgtggttctgaaatcccatatttcttaccctgagcagtttttgcattagacagttgtcaaatgagtagccatacttttctaggccctttagaaatccactgttctgttcattctaatgaacgattttaagattttgtaaggaaggatactagtggagaagaaagaagagatttgggattaactgattttgaaagtgttcctttgtgatgaagaaatcccaattccccagatctcaaattgggattttgtgtatggggggtggaagattggaaggagagtgggaatttggcctgtcaatgccatgtatgttgactttggaacactctttaccactttggttctgtggccaagccttttcctctgttgatattacttgaaataatacttatagggagatatataaaagaccaaattttccatgtaacaaggcttttaggagcctaggtttatgacatttgaaatgtaatgtatatttataatgtatgagaactgaggctctcttgtacatagtcagtgaccacccaagacacctttcttctttcttccattttgctttaataaattcaggatgaagcccagacatgtgataagcttactgggtcaatatgatacagatcagcattggtatatttctcagttttcacaagttgattcctggctttgctctttcttagctgtgtgtatgaatttggacaagttattaagtctaagactatgtttactctttgtaaattgatgataaaaatagtaccttcctcattgggttgccatgcagattaagtgaagtaatccatataaaattcttaactaagtcactgacctatagtgctcaataaatatgtgataatgaaacaggtttttaagtgtttgtgtgtgtgtgtgtgtgtgtgtgtgtgtgtgtgtattgcaaacacaattcagacagctaattcactcaacccccttggattttttatagaatgcagggaaggctaactaacattttagtttaaagaccaagaccttttattgatagattgtagttttgtgttcattctttcttagacatatttatatatatttttaccaagtcaactctgaaagaccacatactgaaagaaaagtcagggacaaaaagaaactattaggcttacaaatggcatttaaaaacctttgaagatgatattggaacctatgtttgaatgtctttgtatggactctcacttggtttcaaaatgcagcgtagatttatgtctaggataaagtaaagaaacactccggtcaaataaggggattcttatgatgaatcaaacccagataagtggctgggtgcggtggctcacgcttgtaatcccaacactttaggaggctgaggcgggtgggtcacgaggtcaggagttcgagaccagcctgaccaacatgatgaaaccccgtctccaaatacaaaaattagctgggtttggtggcacgcacatgtaatcccagctactcaggaggctgaagcaggaggatcacttgaacccgggaagcggaggttgcagtgagccgagactgcaccactgcagtccagcctgagcgacagagcgagactccatctcaaaaacaaacaaacaaacaaaaacaaaacaaaaaaaaaacccagataagtgaaatgaatttctctgagctccaaaaacaaaagaaatttgaattttaaaagatgtactagaaagtgctttaaataaaagaatgattctgcgtgtcaggaaatcaacagtggcccaataggatgaagtaacaaaatgtcagcacgagtgatgaaattggacaattgaatagtatcacttaacaaggcgttgaacaaagaaaaatttaagaatccctatatcttatatctgtatttcttctcaagggcaagggagaggatgttcataaggcaactatagatcatgcatcaaaagaagggcaaatttatttgaaattgttctgtggctgtaggatcctgagtgaaaatcagatttgactatacacagagtccatgacctcctacatgaggagagaagctattttagttttcaggatgcaattgcagtacaaatagtaacagcccaccctgaagacagaaaaaaaaaatggagcaaaagcccattcttttatgtttataatcttggtatgaaaaagagcttaaggcaggtatggtcttttattttcagtgacatgaaatcatctttgtatgagtgcaaattaacactctcttttctggcaatgagaaaacaagacatttgtgttcataaagagaatgcctttgtccaaataagacaagaggctcttatggagagaatattaaggaattaacagatatagtatagattgtgagtttttttgtgtgaagcctagttacctcaaatttttattctttatatttacttaaggaaggatatttaaattcagccatgtttctcactgttctgtgccctccagggagctgtatttgcagatactgtatgttgttcatagtgatttaccatttccatttaatcaaatgcttgttaaaggacttaaatggacatacaatttaaacttagtgggcacactttaagaagaaaattcagtgattataggacaaattgtttaaggcagaactgcttataactttgctagccatctcagctgcagtttctgcttttagaggacaaatgtaaatagtatttcagtgtactttacattttctgtgtcactaatagtgttctaccacttgaaaggggaactaaaattaaaaatcatcttctgggctttttttccccagtaaaattttcaaggaacttaccttcctttgtcatgaagttgttttaggggagaaaacatttctgatttttgttggcttttttttgtttttgttttgtttttagatccttatttagcaaggttatgcttttaaacatctaagggtagagggtgggatatgtgtcatttattaccttctgtcttggggtaatgttctgattgagagtgctggagccaagttgccaggtttgcctcctatcaccattaagtattagctgtaagactttgggaaagttatttaacctttctgtgcctcagtttcctcttctgtgaaattagattaatagtatcttgcatgtaatattctgaaataaaattagaaaatacatggaaagtactaagaaaatagttggcacaagataaatgatcaatcagtaaatgttgctgtcatctttaacattttatatacgaatccacataactggacaactgtacttgtttttagttcatcaaatattgtgcaatatgaaaatatattctctgcatttaagtgatttacaacctagtaaatagaaatattcataaataactatagtatgaacccaaatgaaagaaatctttataagatcattacccctgaaattattgaccctagagggaagacgttacttctaacttggagaatgatggaatactttatgaagataggggcttttgagctgggcttcataaagatataaagggtttcagaagtctaaagacaaagggaaaggaaggtacctggacaaaagaccataaacaaacacatctattaagtaccaaccaggcagtatactaagtgctatcttaatttaaaatcatcatcatcaatcttttaaggcatatatgcttgagttcctttaaaagtgaaattgacgctcagatttgcccaagattacacagctaaataagggatacagttggaattagaacccaggtcgggctggctgtaaaacgtacaccctttctgctatactgcagaaagctagagaacagtgtaaacaaaggcgcagatgagggaaagtgcaatagatgtttaagaaacttctaataaagtgtctaagtaggatggtggagtagggactttattgagagatgaggccagagagtgtgctagatattatagtcttgaatgccatactgagagaaaaaaaaaaagtttagaccttcttctgtaggcattaaatgcctaaagcccactgtgaagataatcccatgagagtattatcatagcagtgggtatagtgcattgtaatgagagattaaaagtagagagtctactcaggtaggttattaaataatttaattattcagggttttttttttctgtgttcagtttccttctggggaataagaataacagaaaacacccacatgtaacattcatgtttttcaagatgttaagtttgccctcacatattaaaaaaaatgtttatttgacgatgtttcattatattcacttcaaacaataaatcttgaactatgtttgcggatataatcattaacttctaccttctagtacacaacttaattttttttctgcttttccaagaattcacttatttaacttaacacatgtgaattgaagagttttgttaagagataggattaaaggagatgactctaggtgcccagggagggggaggtgcggtgagagatggctgaaggaatagaacactggtgggaagcaaagttcttttctaccctcttaggttctctggctaggtctgtgaaataaactgacaactgatggattaacagaaaaggcatacaaatttatttgatattcaaagttttacatgaatcagctgccaggggtgggttggaatagtgggggatatctcgtagaaagaaaacccccaatgaaaaggctcggtttggaggtttttataccatttagacaagaagacaaatttaaagggaagcgacaagacaaaggaaagggactttgagcttctaggagtgatgaacaataggaaggcaaatattaatatataagaaactaatggtagataagggctagttagtgaggtttgtgcagattttttctcagtaccatctcatctttggtaataataataaggttgttatccctttcctggtacaggaagtaactggggtacagggaattcctctctttcacaagaggaatttattgtctgttttcaggcagatagaaggagagcagaaagctctcctcagttgctttcagctcaaaataatctttccaccagagtagcatattttgggatggcatattctgatctacaacaccaaagaaaaactgctcctatctattttttgcataaaggcagtcactgacttttgttatccataaataaaattcacagataaattaatcttacttattttctaaccctggtatgctacagtttacatgcttaccccacctcatattttcatctcgttaactaatacataagctgctttctccacacaatttgtcatcattccaaaaccatttttttttttcaaatttattccatgtgcatgaccgtgtccctttgcctaacatatccatcttttctcctgtgaaatttcaagttttattcttccattgttccatttgtgacctaatctgtgaagcctttcttatcttttccaagtaaaggatcactctcttcttacttcttcagttgcccctttgagctctataatatattcttttttttttttttttttttttgagacagggtctcactctgttacccaggctggaatgcagtggcccaattcaggcccattgcagccttgacctcccaggctcaggtgatcctcccgcctcagcctcccaaagtgctgggattacaggcatgagccaccacacccagcctatttctttctgttaaaagtccatttcccctgttggcctatggtcttaagatcagacatcatgtcttattctcctttgaaattccaggacccagcacaattatctggcatgtgatatctaccctaatggacggataatgatggatgaataaagtggcatgaaattaataaacttcatgccaaagtcactactgtataatgaaacgactgtgatgattgaaagttattctctctgtgaatcaatttgggagcgtttctttatgtcttagtcagggttctccaaagggacagaagtaataggacatgtatagttagatctatgacagggtttttatttggggtattagctcacatgattacagagggtgagacataccatgatatgccagggaggccagtagcatggcagaatcttaggctaaaggcctgagaatttgagggcccattgatgcaagtcccagagtccaaaagctggagaatctggacttctgatggccaaggccaggagaagagtgtcccagctccaggagagaggaagcaaattcacctttctgctccctttttgtctatccaggcccccagctgattggatggtgcctatccacattgagggctgaacttccccactcagtcaaccgactcacacaccagtctcttctggaaacaccctcacagacttacccagaagtagtgctttgccagttctctaagtatccctttatccagtcaagttgaaacctaaaattacccatcacactgttaccttggacatcaggagtagctttctggcgaagcctctgtcaaagccagtttctaatggctaagttagccagggacttataaaggccctttataatgcaaacttgaccatttggtggagttgcttttgatgttaccagtaccatctaatgtccaaatccaataacatattattactaaacagtcttcatttcctcatgatttttgacaattttgacttgcttctctttcttaaactcttcttttagcctccataatagtcttctgttttgcttcctgcccctttgttcattttgggctcctttgcttgccttccttgaactgctaagccagaagcaattttccctcacttaaagatcacttataagatacatactttatgccaggcacttatgtatgtgtctgtttgatcataaaaatggttctgttagcttagttttattagcattgttttatagttatggagactgagattcagagaggtcaagtaacttgcccataatgaaaagtctagaagcgttagagctttgaattgaaatctttcagactccaaagacatttaatctactctgtcactctgtctatgttttgtccacctgttaatttgattttaggaatacagattgtcgtatataaattctggtccatttcctcctgaaaaccagttactggcatttccatgaatatagaaaactctgtaaaattgttttttctataagagaagcctacagacctctcttaggtgatgaagaggcttagaattgaatatcaaatttggcttgccacttaaaacagaatggagtctcaagttgcaagtagggttgtttgttaaacctgaaacacaaaacaagataaagggaggatataaccaccaaatagaaaacttttgactctgtacattttgagaaagccctgaagatgtatttgatctattatacaattcaggtttacattaatgatggtaatttacctagaaagatttcacacctgataatagtagttgactctctagggagatgagagacactcagttttcccctactcttttgtactgtgtgaatttttaccacatgtgtatattatctattcaagttaaccaataaacatatttttctaaataagagaaaggtatctaggtagtccttaagggatccattatttattatccccatttttaatccaaccatcttgctaaactctcttattaattttaattattcatttctacgttccttggatttttttatgcacacaattaattcatccacaaataattaaagtttagtgtctgcttttccagtacttatacctttatatctttattcatttgccgtattttgatggccagaacatctaatgtaatgttaaataaaagtaatggtatctggcatcgttgacttgttcctcaccaaagggaaagcttttaaagatgttatcattaagtatgtctgctgtaagagttttgtagatacatacccttacaaagaagtttccttcagttctcaatgtgctgagagttcttaccataaatgaatgctaaagtatattactgcttttttgtacctatttaacatgatataatatttttctttcaaatattgatctagtaggtgaaatttttttttaacctaatattaaaccaactttacattcgctggaataagcccaacttggtcaagatttattctccttatatattgttaaaatcaacttgctactattttgtttaggattttttcatttgtctttatgaataacattggcctataatcttttccttttttgcattgtccatgtcaggttttgatttcatgggtatattaacttcataaagcaaattaaggagttctttcctcctttgatgtggaaaaatttgtgtaatacgaaattatttctttcttgaatattggctgaactcgtagatgaagtcatgtaagcctgaggtagaaatatttttgactgtcgatttatgaatttaatacctgtaggatgattcttgctttctatttcttcttgattagttgggtaagtttttataggaatttttccacttggcttaaatattaaaatttattaacataaagtcttttcagtttcttttttctataacattatttattctcattctgagggaagtcatcaatttaacgtaatgcttaacatttggagaaataaattttaaagaagggttatattctgattttgtttaatagttatcttctggttaataaaaggaggagaaatgtagggtggaaatgcttatcatagtaaatagcaaggtttatatataaaaccatctatattgaacagggagagaggaatgacaaaaatatttacctttctttttgataattcagtgccttattttgggggaaatatttagcttcatagctgaaatggctttgatattatacctgaatggttacagagatctcataaatatagtagtgataaggggtttatatattatgttgggaaatcagaaaatatttaaatcatgaataatgacttttaattgttaaagaccaatattgagtttaaagttaacttataaaatacgtatttgttcttgtgtgtttgttcccagctttttaaaattgatattattgaaatataatttacataaatataaactacatacattttaagagtattcagtgaatttttacaagtgtatacatcagtataactactaccttaattcagttataacaacattttcatcacccaaaaagttaccttgtgtcactttgtaatcagtcccctcccttctccactacaagctactgctaatccactttatgttatcataagttaagttttgcttattctaggatttcatataacaggaatgatacagtatgtaattttttgcacctggctccttttatttagcatgatactttgaaatgcttgtgttattgcctgtatctgtagttccttcttattagtaatccattttataactatgcaacaaattttgtatctattcaccaatctttaatattgcccttgtttccagttttgaactatttttaataaagccgctgtaaacattcataaataagtgtttatgtgactatataccatcatttcttttggataaatacctaggagtggcattatgagattgtagagtagttgtaagtttagccttataagaaactgtcaaacctttttccatagttgttgtattacattcattggtcacttaacaatggggatacgttttgagaaatgccattaggtgatttgatttcatcattgcacaaacatcatagagtgtacttcccaaacctggatggtatagcctagtacataccttagctatgtggtatagcctgttgctcctaggctacaaatttgtacagcatgttactacactgaatagtgtaggcagttgtaacacaatgggatttgtgtatctaaacacagaaaagctatagtaaaaatacaatataaaaggtaaaaaatggtacacctgcctagggcattaccatgaatggagcttggtggagtagaagctgctctcggtgagtcagggagtgagtggtgagtgaacgtgaagacccagacattattgtacattactgtagactttatcaacactgtatacctaagctacactaatttattttaaaatgttttctttcttcaataataaattaactatagtttactgtaactttttactttataattttaatttttttcactttttgactcttttgtaataacttttagcttaaaacacaaacacattgtacagctgtacagatttttccttattctgtaagctttcttccatttttaaatgtatttatttatttttactttttaaacattttttgttaagctcatcaacatcactgtcttctacatcttgtcccatcggaatgtcttcagggacaataacacacatagagctgtcatctcctatggtaacaatgctttcttctggagtatctcctgaaggacctgcctgagcctattttacagtaactttttttgttaataagtagaaggagtataatctaaattaatgattaagaagtatagtacaataatcttattggaccaccatcatatatgtgacccatcgttgaccaaaatgtcattgtgcagtgcatgactatattttgcactcctgccagcatcctaaaatcattccatttgttacatatttttgccaacacttgatattgtcactttaagaaaaagatttagttgttctagtaagtgtggatggtattttaaaatttttgatgaagtccaatttatcagggttttttttttcctttattgtacatgttttttgcatcctaaaaaatagttgccaacccaaagattttctctgattttttttcttgaagttttattgtttcagcttttacatgtatgtcttagatctatttagaattaattttgggaatggtatgatagaaggattgaagtttacttttttctgtatatacagttgttttagcacacatatggttgtttcacatacctgcagttgtttcaacagcatttgtaaaaattactctattttttttttaacttgccaagttgttttgaaattcagttgattatggatggatctgtttctggaatttcttttctgtgcctttgatttatatgtctatcctaataatactacactgtattgattcctaatgcttttattaacagtagaacttcaaatcatgttgtgtaagtccctagttttattttttctttttcaaaattattttaactattataatgtctttgctttttcatttaaatttttgaatcactttgccagtttctactagaaaagtttgtatgattttaattggaattgcattgagcctatagataatgtaagaagaattggcattgtgacactattgagtctctggtctatgaacatggtataactgtcaatttatttaggtattctttaacatctctaagcattgtttggtaatttttagtatgtaggccgtgtgtgtgtgtgtgtgtgtgtgtgtgtgtgtgtggtttgtctctaaatgattcatgctttttatggtactataaatggtattttttaaattctatttgcttatcatttattgttagtttatggaagtgaactgattttggtataattgactttgtgtctgacaatcttgctgaagacaatttatttattctagtggcttatttttaaggtacattaggattttccacataggccatcatctcttttgcaaatgaagacagttttcttttttcagatccatatgctttttccttttcttgactgtcgcactgggttgtacctctaatacagtgttgaatacaaatggtgagagaaagcatgttcaccttgttcctagtctgagagagaaagggttcagtatttcaccactaagtatgatgttagttgtaagtttttcataggtattccttatcaccttgaagaagttcctttctattcttagtttgctgaagggatgatgaatgctctcaagtgcattttctgtgttgtgattacattactttttcttttttttgttttgaggcagggtctcactcctgtcacccaggcgagagtacagtgacacaatcacagctcactacagccttcccaggctcaggtgattctcccacctcaaccttctgggtagctgggactacaggtgcatgccaccacacccatctaattttttgtgtttttgatagagagggtttcgccatattgcccaggctggtctcacactcctggactcaagcaatccacctgccttagcttcccagagtgctatcacaggcatgagccaccctacctggccttttctattctctttacatagtgaattatatatatatattttttaatgttgaaaaccaattttaatatctggatgaattccatttagacatgatgcattattctttttgtatatgactgaattatctttacttgtattttgttaaggttttttacatctgtttataaaagtagttggtaattttatttgtttttgtaatgtctttctctggttttgtttgatttacaagctgagtttggaaatgttccttagtcttcatttttaacaactttttctttcttctgtcataattgggaatttgtatctttcatagaatttgttcatttcattacctgtcagttttattgacatacaattgttcatgtttattttctaattattcttttaatatctatagaatatctagtgatatcccataatttattactgatattgttaacttacattttctttttgttaaggcgtatcaattttattgatttttttcaatgaattaacttttcatttcaatacttttttacctttttctggttttattttgatttctgctcttcatgactgtcattcttgtacttacgtcatgtgtaacttgctcttttcctagcttcttaaggtgcaagttactatatcattaatgttcaaccttcctgctttactaataagtattggaagctataactttctaggcattgttttaggtgcattacacaaattttgatatgttgcatttttattatcttttagttcaaaatggtttctcatttccatccctgggttatttgggagtatatttttaaatttgcaaatacttgtggatttttccagatttctttttgttattcttttctactttagttctgtttcttcagagaacatacttgtatgattttagccctttaaatttactgtgatttgttttatggtctgacacatctttgttggggactagtacgcatgcatttgaaaagaatgtgtattctgtcatttaaataaaactttctgtaaatgtcagttagttcagtttggtttttatgctattgtttaagtcttttatatggttattgattttctctctacttagtctttgaattattgaaaggtgactgttaaaagttccaaacatgagtcaatttattctatttagttttgtcagttttggctttgttttagatatatatgtatataggagtttttttttttttttataagttgacccttatttaattatgaaatacctgtctttatcgctggtcaaatttcttgtcctgaagtctactttttctgatatagccattccagctttcttacgattaatgtttgcgtggtgtatcttatctgtatttttatgtttaaagtgtttcctttttttatttttttaagacagggtctcactttgttgctcaagctgatctcaaacccctagtctcaagcaatcctcccacctcagcctcccaaagtgctggaattacaggcatgagccaccgcgcccagcctaaagtgtatttcttagggacagcatagagttgaatcttgctgttttatccagtcttataatctctgccttttaattataatatttagaccccttatacttaattatcaatacagttggttttatgtctgtcatattttttgtcttctctaagttcctatgttcctcatttcctttcttttttttgagtatttttataatattttttctcctttactagcttattaggtatatactgtttcttgtattttttaatggtttctctaaagtttataatatgtttaactttttacagtctgtcttcagattatatgataccactttataatggaagaatcttataacattatacttctattctccccttttattatttgtgcttttgttgtcatgtatatttacttgtgtttgtgttataatcaccttaaagcactgttattatttttccttaaaataggaaattatcttttaaaaaaacttaaaaacaagaaatcaaatatcttttatatttatctacctagtcaccatttctcacaatattcatcccttatttatttattgagacagagtcttgctttgtttcccaagctggagtgcagtggtgcaaccatagctcactgcagcctcaaactcctaggctcaagagatcctcccgcttcagcctccggagtagctgggactagaggcatgcatgcatcaccatgcctggttaatgtttttttttatttttagtagcaacaaggtattactctgttgcccagactggtctcaaactcctgagctcagatgatccttctacctcagcctcccaaagtgctggcattgcaggtgtgagctaccatgcccaccttatcccttttttagatcagagttttcatgtagtataatattccttcatcctgaagaacttcctttaacaatttcttacagcgcaggtctgtttgtgaaaaattatctcagctttattttatctgaaaatatctttattttgactttaattttgtgtatctcaatggatggctttcttgtttatcatctttttttttttttttttgagatgaagtcttgctcttgtcgcccaggatggagtgcaatggtgccatcttggctcactgcaacctctgcctcgcaggttcaagcgattctcccacctcagcctcccgagtagctgggattacaggctcctgccaccacgcccagctaatttttgtatttttagtagagatggggtttcaccatgttggccaggctgctctcaaactcctgacctcaggcgatccgcctgccatggcctcccaaagtgctgggattacaggcgtgagccactgcgcctggcctcttgtttgtcatcttaaagatgctgtcctattgtcttctggcttgcattcttgctgatgggaaattggcgatctttctctttatgtaatgtgtctttgtttctttggcatttctacagattttctctgtttcttgtcttcagcagtgtaactgtggtgtgccttgatgtggtgttgtgcttctttctgccagaaattgttaagcttcttagatttgtgggtttatagtttacaaatttgaaacattttagtcttaacgttttcatatatttttttctcttccttctttgggactccaattatacatttattaggttgcatattgcccaataggtcactgagatgctaatctctttttcctctcatgcttttttcctgtctgcttcagttgtaattttggaggtgttaccaaattttttgatgttttattcctcacttgtctcatctgttgttatgtccatctccttacctgctttgtggtccagaaattgcctctcagtagaaaaccagggtgattataggactcacttcatttgtttcttttctctcaaagatcacagtcctgtactgcctgtggtccagtggtatcttacatatttttttcagttttccagttgtatatggtaggaaaacaaatttagtctgtttactctgttatggccaaaaatggaagtttttatatatatatatatatatatatattcacgtatcttatatttaaatacattgtatatacttatacctatactaaaattaatttacatttaaaatcagttacatctatctctatgaataaatccaccagttgctgagtgaataactgttcatttctcaacttgtcaggattttattttattatattttatatatttatttatttatttatttttgagatggagttttgctcttgttggccaggctgtagtgcagtggcatgatcttggctcaccatagcctccacctcccgggttcaggcgattctcctgtctcagcctcccaagtagctgggattacaggcatgtgccaccacgcctggctaattttttttgtatttttagtagagatggggtttctccatgttggtcaggctggtctcaaactcccgacctcaggtgatccgcctgccttggcctcccaaagtgctgggattacaggtgtgacccacagcgccatccagatttttaatgtattgtctataatgaccctttttaagcaagtcaataaagataaaactattttagtagatgcaggttttcttcactagcctacgtgtgctactaaaaatgttttggtataagttagtgtagtatcactgacttaagcaagttggtgcatgtttatatgtcttctgtttttataaaagacttgctaatttttctgttgtcttttcttagtctcttcatagtcagaaaaaaatattgggtattttattagcttagccttgaggagagttctgcagtaaaactgccggtttccaaaaaagagggagaaaataataagaattactgactcacacttttattttatttagcaagtaaaaaataacctgttgagctagaacttatttatagtaggccctagcagaccacagctacaactaggaattaccagtcatccaaaatacaatcaagaaccattaaaaacttacattaataaccttgtacgtaccacttccacatctctatgctagaagtaaaatatctggtcttatttttctgttgcatgcaaaaaaaaaataatttatcttaagccaatatctagctatctgatagtttaattctaaataactttttttgtaatcatactacctttggggagagaggatgtactgagatatgaagccattatttttctttcattaaatttcagtcctaaaagaccattcaaactggcattcaattcgtatgttgactttttttttttttaacacataaagtatttatctgtttctgcaggaaatagtgttaagagttaacccttggatagcatctaatatgacatcatatattaatgccatagtaatcctgaggttacagtaagacagtgtttattcatgttggatagttatcagatgtccttcttgggtttagagtggtaattgtacatattttaaactcctcttgtgtggtaatccaactagattatcttatttatattggggctaatttttcatactgtaagataatatactacaattttcctagttttgctcccatcagaagtcagaagtttcaattatgtaatttataatccctgtaactgccagaagtagactccctgcttatccccaagtgaatcctcatcttcaccaggtctctgcattccttctctatattaaaaggtgactagacccaaaatggcagaaggagatggagctttcggctttaaatttttcattgtcctgtcattatttgttctcatagcaaagggagcagttcatgatggctgcagcatttagtggtggtggctcttggcagtagctttcttgcagaccagagtctgtcccctccttgaatggcaactaggttgatcagtgagattttcaactgcttttctggatgatgtttacaggagaattatttgtgggtcaccagtggcagttctgataccatacaacttgtttaaaattcctgctagaaagaaatccatattgcaccacacagtgcctctttctgctgttttctgaggccagcatagaaatgctgtctcttaaccaactcagggtaagttattatattcctaaaggacatccagaacctactccaaccactttctacattcaggtcactaaaagagtaaataaatcccaaattcatcttcctttcccctcaccccagccccccaccccgaatatggaagtgttgattctgtatacctcaagtcccagaaatagcccataatattccaaagttaattctaatagtgagtattgtattacccatgttcattttttttttttttttttttttttgagacggagccttgctggagtctctccagccaggctggagtgcagtggtgcaatctttgctcactgcaacctgtgcctcccaggttcaagcacttcccctgcctcagcctcctgcctagctgggactacgggcacacgccaccacgccaagctaattttttgtattttagtagagacaggattacaccatattagccaggatggtctcgatcttctgacctcatgatctgcccacctctgcctcccaaagtgctgggattacaggtgtgagccactgcgcccagcccccatgttactatttttaagaacatttgctaatttaaggaaaatcctcagctaggaaaagatcaacaattcccatgcccacatgtctttatttcttcttgatacacctataatctttgatgctgctgactaattccaaagagtattctgattccattaaaaattctggaatagtggaagacattattattttcttgtatgccattagtaacaagatgcacatttctgaagagcagctttattagaaatgaaagggaaaatttaaaaatggaaatgtatgagtttgtaaagcgcaacttgcatatgtcaaagaaactaaagtttaactcagcttagctgaagtaacttttctaacatacaagccaagagttttctttgttcttattattgctttgtcatgaagcctgaaggatatttaggtagatcctatcctacattcaaattagaccactttatctgtttctcatagctgttatttggacttcgtttttctctctgccacctggcctgacctctatgacattttaagtctgtttaccacctcttagctgcctaccatggaaagcaaaagactccaacacatccaagttccagagccctttagatgcccagtttcctacaggaggcatgtctccattcttcctactttctgagattctctctagtaaactcagtcatgtccatttcttttcccactcttcctactttccagagaaatgttttttccttggcttagaatagaaaaatacttcaccacatatattctcatccaagtaattaccaaggttattaaaaatgcatgtgctgaatgatagaataattaaaaagaaagatagtcctttttcccaaatgaatattcacattttcttgttttcctaataccaaatgtccatccatagagatttgtgccaaggatgttggcaggttttacatcaattactggtattttatgagagaaaatgaatgaagaaggagtgtgctgggaaagcaattattcactttgtttttctcaacttactctttttttcattttatttcagtctttgtttcttttggcttttcttccattgacaatctttttcccttttatttttgtttacattcaaaagtgtcctactctgcttctaactttattcttttattaaaacttacacttcaaaatatgggatcttaagtttaaaatacagttaaaaacatgttaaaattgtctcttcgactgggcacagtggctcacgcctgtaatcccagcactttgggaggccgaggtgggcagatcacctgaggttgggagttcgagaccagcctgaccaacatggagaatccccgtctctactaaaaatacaaaaattacctgggctggtggcgcatgcctgtaatcccagctactcgggaggctgaggcaggagaatcgcttgaacccaggaagtggaggttgtggtgagccaagatcgcgccattgcactccagcctgggcaacagagcaagactccgtctcaaaaaaaaaaaaaaaaaattgtatcttcatattagattcaattgtcttaggaattgaagtgaagaaagaaggatgaagaggaaattatctcttggattgctctccaggaaatccttctctatactttaaaagctcttgttcttttctaggagtccaatgtgctgattgctgctaacagtcagggtacaattaaggtaagctatttactatatctccattttaaactcaggcccatttttagactgaaacaggattatagaaatacaccattgtactgagccttagagatcatcccaaatcatgggtctgtgtctccttacaaatggcttgatttaagggaaaagaataggtagcttgcatctgtggagaagatgatagtgcttattgaggttgtatggatgctggatggattaatagatggtcagtttgaaaaacagataaagactagtgaacattcactgtgggctaagcacagtttagcttctgttatgccagtacaactctcccacagggctttcagtagatagagcccaaaatatagcaggagatgcaagatatagcagaagatgcttagacatcaccagatttaaacatatcttggtcatattttattctcttcctcatggttctctttcttctgtcccctaagaagtaggtttttcctcagttgtcaaaggggagaaaaagttattttagtgttcagttgaaaattgatagatgtgattcaaggaagcctagccataaaaaaaggaaagaaaattgattgatgcatatatagcacttgtacatgatacattggataaataaatcctgagataagcagtgaactttctaaacaaaacacccttttggtggagtacgtgtttctgagagtacctgttttttccacatattctctgctgatttggtagaaatattgaaagttttttaacataacgtgtgtgtttctcctgccacttagcattaattttgccatagcttccttagactcatcataagtggagaataatccatcagccaaggcagcaaatcctagcctaaacattctacagaggtgaaatgagcaaacttaacgcagaagaactgcactaatttacatggtagtctccttttttaggcagccagtttctctgtttgaaaagcctctttagagaaccactgagagcttaaatgaaaacgaggttttttaactgatcagtgtttgttatgttctggaagcctcaagcaagatggtagaaggtcttggaatatctgatttaagtggctttctatactctctcagtctctctcttactctcatgtcaagtcatgaattgaaaagctacaccttactcttcaaaaagtttatcctttacaccaattgggattgccagcatacctacaagagctcaaaactacataggttctcataggatcccactgacaaatctaagattttgttcagcatcattgacttcttatgttaagtagcctagttacctaatataaagacaaaagcattatggaagcacatatattagtcaagccttagctgagcagcaggggaaaggttgcacgtttaaatatttgctacttagtgagtgttgtagtgtccatctaatgtaattctttttgacagtgtctcataactatcctcctgttccgtgatctttcttagccatttgcttcctcttagttttagcaatatcacaacttacttttttatgacagtatactactttaattctaaaaatacaaagtatctggacgctagatgattggctagaaatggatgaagcagcaggaaagagcaagactttaggtcctgtaaccttgatcattataaacagtgtttattgatgaaagaagaaaacagattaaaatcctaaacaaggatacttaaaactttcataagaatgtggaaagattccaacatatattccaaaaatgtatttgtgctatgcattagccaatttatttttccatgtgttttatgtagtttaccttgaaggcttccaagttaactgtggagatagctcatctgaaagagttcatgcagctgttaagctgcaggtcaaaaaggattaatgtccaatccattcaaattctttggcattttcccagttgggaaacgttttttaaatttgcttttctattggtaaatatagtaaagagtcattaaattccttttatatcttaaatgattttattaaatggatccttttttccccccaattaggtgctagaattggtatgaagggttaactcaagtcaaattgtacttgatcctgctgaaatacatctgcagctgacaatgagagaagaaacagaaaatgtcatgtgatgtctctccccaaagtcatcatgggttttggatttgttttgaatatttttttctttttttcttttccctcctttatgacctttgggacattgggaatacccagccaactctccaccatcaatgtaactccatggacattgctgctcttggtggtgttatctaatttttgtgatagggaaacaaattcttttgaataaaaataaataacaaaacaataaaagtttattgagccacagttgagcttggaaagtttttgtcaaatgcagcaagagataactctttttaagaagtagcatatgtgaactataatgtaacagtgaataatttgtaaagttcgtatttcccaacctctttgggaattacacatatcaatgtaaacaaaatataaagtacatagatttctgccagtgaatttactgtttacggtagatagaaagattactttataaaattctttcttcattctctgaccagatttatatcatcagcaagtaccatgttgtccagtctctctgaatctggctaagatctaaaattttgatctattgagaccacatttaaacagaaagagaatgttagtctctgacagctagctctgtctttgcctttgaaatgttacaaaaacataccataagccctaaatgtataccaaaccaactagtccattgcttttagtaccatcctaggctgagtaatgtcttggagcaggagtcagcaaactttttctgtaaagggccggatatattttcggttttgcaggttatatggtcagtggcacaactattcagtttggccagtatagcaggaaagcagccacagacacatgtgaacaaatgtgcatggctgggaagtaggcagagggtcagatttggcccacagactatagttcaacagcccttaacttagaggaaaaggatttaaagccctgttatccaaatttctaagccatatggtcacttagattatctagttggtttttataaattattttcaaattgtaaaaggaaagaagaccagcaagccaagcaaaagtaatgtaaagagttgctttaaaagttataaacaaggccaggcgcggtggctcacgcctgtaatcccaacactttgggaggccgaggcaggcagatcacgaggtaggagatcgagaccatcctggctaacatggtgaaaccctgtccttactaaaaatacaaaaaaaaaaaaaattagccaggcgtggtggcggcacctgtagtcccagctactcgggagggtgaggcaggagagtggtgtgaacctgggaggcagagcttgcagtgagccgagataatgccactgcactccagcctgggcaacagagcaagactctgtctcaaaaaaaaaaaaaagttataaacatacttatacaccacacattttataaaaataaacacttgaataataataataataatacaataataaacacttggttgaataaagataatgcacgatgaaggtaatcagaatatcccaatgtattcttccactcaagattactgaaacctgttacaggttcacatcttcttatctgaaatacttggggccaaatgtatcatagaacttagaaattttcaagtatggccaggcacggtggctcatgcctgttaatcccagtgctttgggaggccaaggcaggtggatcacttgaggtcaggagtttgagaccagcctggccaacatagtgaaaccccatctctactaaatatacaaaaattagccaggcatggtggcgggcgcctgtaatcccagctacttgggaggccaagatgggagaatcacttgtgcccaggaagcagaggtttcagtgagccaagattgcaccactgtactccagcctgggcaacaaagactacacaagtattagaaaactaatagagtatatatactgaatattatgtaacaacctctaacagagtctagagcagtagtccctaatcaaacacattaatacttctgtagcagaatgcataaatgttcacattacatggggttaattaaccaaaaacagttttgtatcagtgcaagatctggttttaccaccaaaccagttcctcaaagtcaggtgaatttttttttttttttttttagttttttttagtttttttttcattttcagatcaagagcagtgtatcttgattctgtgagttaagacctgataaacttttagactcaattctgagaggaaaagctagtatcgttcaaaaattacaggtcacccaccagaacaatattagttgaacattgtttccaagattaataaaggaccttttgcaaagatgtagaaagaatattcaaatgtagaaaatcttccaaatacgaagcagagagttaatgcctcctgaatgcatttaagtagaagcatattattgtgcttattttatttggtcttttttaatgtttatttctaaccgtctacattgtggggccatttaatttctacatgtttgtaagaatacaataaggtacatgtagttatcaaagcaatttcgtttttaaagaaggcagtgcttcaagtttttttctaattttttcttataaataccatttttaaatttgagatcatgtctgtgagatttcaagatcaaactaatattactgttccttgcaaaaataacatactattaaataacttaaaggtaatatacattttaacaccaaaaactcctcactcaacagtatggcttgtcaaaatgttccaatttaatctttacttaagtggacttgtaggggtttctcagacattaagatggaacactttttttcttttttaaatagagatgggatctctctctgttgcccgggctgatcttgaactcctgtcctcaagcagtcctcctgcctcagcctcccaaagtggtgggattacaggtgcaaaccaccatgccagcccaagcttgaagaattttttttgagacaggttctcgcactgttacgtgggctgcagtgcagtggtaacagtcatagctccctgctcataaactccttggggctcaagcagtccttctgccttacccttccaagtacctgagaccacagtttatttttgtagagacagggtctcgctatgttgcctatgctggtctgcaactccttggcctccgtaagtactgtacttgcacccagccaagattggagaattttatacagttcttacaagaagactgaactattaaatatcaaaaaacatatgggactgtgctacaacttcagaaagattagcctgaacaatgaagagagaagtataggctgaattgaaagaaatggaggagcctagtacaatgagccttctagaacgtaactgagaatttgaatttggtcataaaagcattaaagggaggggctaaaggggatggcataatctgatttatggtgaatggatagatgggggcaagagtgcagttaggaaggtgatcagtcaagagtttatggagacttggagtgaggttgcagcattatccaacctaaaagcttgtttcagctatagagttcaccacaatcttaattcttaatcttggaagattctgaatttttaaagtcattgtcttataagttgtgaacaacaaagagtgtaactcagcaaatttatttcttcggtggttatacaatcttcagccagcagtaagtcacttgggaaactcatgaccaaaatgttcatgagctattttgggggaccagttctctaagtcagcagacctagaaactctccagccctggtcctaaatataagagtaattagtcattgcctttaatacaattatgcagataaaactggggttattagaagtctgcatacttagaaatgaaacattaggaggtgctacctcagatcttgagcctattatgttacatggctaacattaaaactttaccgacagtagaaatttgttgttcctctcagagcagttagctaacaaatccacatgtggcttctggttaatgtattaggcatttctggactgttggactgaagagaaaatcatagtgatattctagacatatttgttgagctccccctttgtgcagggaactatgtactgtgtactaagaatagatataaataagatttgatccctaccctcaagaagcttattgttcagtgggagaagcagataagtatactgggtgtaagtaccataatacacaaaatctttaggtatatgcaggaaaaacatagagtagtgggagattaaggactagtagaggcagttttcaggattttttttttgtgtgagaattaagctataagaggcaaaggaacatctaagcccaatggaagcagatttttaaagtatgagtagctcccatggccaaaactggaacaatttgaacaacgaaatgaagtaacatggaattataacccaaagtataaaataaatatgtgaatccatgttgatataaacaaatgattgaataaatatatagagaagagacaaattttccatgaagaattccaaataatttatgtaggtaaatcaaagagatggagcataactttccactccagtatggtctctgcttattgacttccctcccaaagagtacaatatggaagaggagaaaaaaagagtcaatttaaaattgagaagccttacaaagactaccttggccaggtgatcaaggtcaacatccaaagtggtaagtcatgttgatagtatatactcttgataagatgcaatgaaaaatggcattttaactctgatctttcttccaaaaataaccacataaccccagcctgagaaaaacaccagatgaatccctgttgagagacaacctgctatagcaggggtctccaacccccaggctgcagactggtaccagtccgtggcctgttaggaaccaggccgaacagcaggaggtgagtggtgggtaagtgagcatcactgcctgagctccgccgcctgtcagatcagtggcggcattagattctcataggagtatagtccctattgtgaactgcacatgtgagggatctaggttgcatgctttttatgagtatctaatgcctgatgaactgacatggaacagtttcattcccaaaccactaccccacctctgattgtttcagctaatagagttctccacagttaatcttggaagattcttaatttttaaagtcattattgagtttccatagacgtctggtctatggaaaaactgtcttccacgaaactggtccctggtgctaaaaaggttggggaccactatactatagtacctgatactaaataccacaaattagttcttcaatacctcatcagtgctcagtgacagttttgtcaaaagtcatcagaaacaaagtctgggcatctgtcatagccatgaagagcctaaggagactttactgtgctataactggatgggattttaaagcagaaaaagacattacataaaaacaaatctgaatcaagtatggacttgatattattgtgtccacattggttcattgattgtaacacacataccataccaacataagatgttaacagaagaagtggagtgtgagtatatgggaactctcctacctttgcaatgtttctgtacatctaaaccttgttccaaaattaaaagtttatcaaaaattttttaaattttaaagtatgaggattattatactcaaagtggaagacaaagtaatgggagtgaaagctggagaagtatagattataaatcagtgatctgttccagttgtcaacttaaaatagggacaaagaatagggagtttagagatttacatttcaatcccaactttgtcattaagaaattgtgtcgttttgaagaagatggtaaacctcttcactccatatttatctctaagattatgctgtacaaagtccatagtcattcttggtgatttagtctcagatatctgagtgctggtagttatttatttattctttttcccagagatcattacagcttctcaatatgagaatcaagaactttttccattcatgtatgattttaatttgttacttcaaagaacaaatcacaaatttgttcagttttagagtcaaacttcctagtgcctaaattctgaaagaggtctcaggctggaagtaggtagaatttctcatgaattttaagttcaagttcccgaacatggtagcagttgacgttaattattgtgtgaaataatcacctttggtaaacagctgaaagaattttttttttttgagacagagtcttactctcttgcccaggctggagtgcagtggtgcagtcacagctcactgcagcctcaacttcccttgctcaagcaatcttcctttcatagcctcctgagtagctgggactactggcacacaccatcatgcccagctaattcttttaattttttgtggagatgagctctccctatattgcccaggctggtctcaaactcctcccaccttggcctcccaaagtgttgggattacaggcatgagccaccacacctggccctgaaagaatgatttatcctagaaaattgtttgtgtgagcttcattggaaaagcagcttaataattcagttcactcccttctttgataccttagctagtagtttgtaatgggtatgagcagttattccgaaggaatgagtaaagttgttgaaccacttgcaatatggtggtttcattccttcaataaaaattttagtgggccaggcatggtggctcacccctgtgataccagtacttcggtaggccgagacgggcagactgagctcaggagtttgagaccagcctgggcaacatggcagaatcccatctccacaaaaaatacaaaaaattagctggatgtggtggtggtgcacacctgtaatcctagctacttcaggaaggctgaggtgggaggatggcttcaggctgggaggcggaggttcagtgagctgagatcatgccactgcactttagcctggataatagagtgagattgtctcaaaaaaaaagtttaaaaattttttaattaaaaagtcaattttaggccgggcacagcgactcacacctgtaatcccagcactttgggaggccgaggcaggccgatcacgaggtcaggagatcgagaccatcctggctaacggtgaaacctcgtctccactaaaaatacaaaaaaaaaaaaaaaaaaaaattagccgggcgtggtggcgggcgcctgtagtctcagctactcaggagactgagacaggagaatggcgtgaacccgggaggcagagcttgcagtgagccaagatagcgccactgcagtccggcctgggcgaaagagcaagactccgtctcaaaaaaaaaaaaaaaaaaaaaatcaattttaatgcttactgtgtggtagtctcttttccaggataggagtcggcacattttttctgtaaatagctagatagtaaatattttaggctttgtgggccagaaagtcgtcatcacaactacttaactctgctattgtagtatgtgaaagcagccctagagaaaatgtaaacaaatgagtatggctgaggatagagaggagaaagtgctttttttatactctcaacaaccagtcaattctgcagtggacactggctgggtgtcctctaattcaattcagttcatacactatctacctggagatgttactgatggaagatatccgagttactggcagtgaatttgtaccggtctgcaacaacctcagttctcgccgcctcaggagaaagaatttgactaacaggcataaggcaagaaaagagaccgaggcaagtttcggagcagcagtggaagtttatttaaaaagtctttagaacaggaaagcaaagaaaatacacttggaagagacccaagcaggcaccaacatcaagtgccgtgtttaactttgattctagggcttttaggctggcccctttcccatgattcttcccttaggttggcctgcccccatgcagtgtccttacccttgggaggtgagcatgcgcagtgtgtttaggaagttgtacacatgcctgcggctctcttcctctttccagtggtgtgccccctgaaggtcatactccgccattttgtctcttaatacgcatgcctgggaagttgcatctccctggtgtctgcattcagttaacacttcagtgcaacagatgtggaccatcaacaagtgaactatccctggtgcccagctgccaatttatcacttttagagaggcaatgtgataattgttgaaccatcacccaacattcctagtgggtgggagaatagccctcttctgctccacgcatgcctgtctaaccacctgtaaaaaatatagcatcagatcccacaagtgacggctcagtcccacaagacttcccccctacccacacctccaatgtcagttgcaagctctgggtggttttacctgttcttttcacaaactgtaaatcagggttcccatgaacccttctttgggtttaattttctcgagcagctcacagaacctagggaaacacttaagtttaccagtttattaaaagggatattttgaaggatacaaaggagcagccaaatgaaggtctacataggatgaggtctggaaaggtcctgagcacctgcacttccatcccagtagagctggagtgtaccccctcctgtcgcatagatgcattctgctatccagaagctccacaaacccaatctttcagatatttttataggaacttcattacctaggcatgattgatgaaatcattggtgatcaactcaaccttcagtccctctcccatccccagatgtcagaatgggtggggctgaaagtcccaactttctaatcatgccttggtttttccagtgaccagcccccatcctgaaattaccatccagtcattagtcaactgattagcatacaaaaagacacttaacgctttggagattccaagagtgttccaggaaaggggacaaagaccaaatatgtatttcacaatgtcacactgctaacaaaaccactgaagtgtgagttgtcatgtgtcacagaaattttttttcaagcatttaaaaatgtaaaaacatttatctctcatgagccatataaaaaaaaataaaaatccacaagctggatttggcttgcaggccacaatttgctgacccctgttctaggtgctgactagacagcagtagcaggagaaagaaaaaaaaaaaaagatgaaaatccaaactttgctgagcttgcgttcattctagtggataaaagtacgtccacagaatgcaattctctttccacaatggtgtggagcacaggagcctggaaggccattttagagggcataccacccaactaagaggtttgttgttgttggcttgcatgcaatttccacaggagtgtacacagcactgttataccttggtatgtgtgctttcagagaaccaaggaacacttttcctgttaaacctcggtaatgttgggcagggtggtttgtgcctataatcccaacacttcaggaagctgaggtgggaggatggcttgagcccaagagtttgagaccagcctgagcaacaaagtgagaccctgtctctacgtaagatttaaaaaagaaaaaaaggaggaaaaaaaaaagcctggtgtgatggtgccttcctgtggtcccagctacttgggaggttgaggtaggaggatcacttgagcctgggaggtgaagctgcagtgagccatgatcaggccgctgcactccagcctggacaacaaagtgaaaccctgtctcaaacaaacaaacaaataaatgaagctctggagacagaactttcagagtttctttgtttttgtttttgttttttagacagagtctcattccatcgcccctgctggagtgcagttgcacagtatcagctcaatgcaacttctgcctcccaggttcagtgattctcatgcctcccaagtagctgagattacaggcatgacccaccacgcctacttaacttttgtatttttagaagagatgggatttcaccctgttggtcaggctggtctctaactcctgacctcatgagggtgatctgtcagtgttggcttctcttttctttttctttttcttttttttttttttttgagacagagtctccctctgtcacacaggctggagtgtattggcatgatctcagctcactgcaacttccacctcttgcagaacttcaagcaattctcatgccccagcctcccaagtggctgggattacaggcgtgcaccaccatgcccagctaatttttatatttttagtagagatggtgttttgccatggtagccagacaggtctcaaactcctggtctcatgcaatctgcctgccttggtctcccaaagtgctgggattataggcatgagccactgtgcccagcccagttctattaatgtatctataacaaagataatttagaggtctgaggttgagattattttcattgaatactctgaaagatttgtgcttaagatatagcctgttgaatgtggggaaacaggatattttacaaggctggcttttaattttttccccttttctttccctttttctccctcacctttctggttctttcaccctgagctattgaaatttcttttctgaatataaggcagtttctcaggcttgtagcacttgtatggagacttggaacctgattcttttttggaatgaccaaatctcttataagtattcatatcttatagctaatgtttgtgcactggctaatttcgaggggttaaattttgaaagaattaataaattacttttctgctaaattagctactattaacaggtagccattttttaaaatattcttaatatttagagactaaactttagtccaggggtgtccagtcttttggcttacctgggccacactggaagaagaattgtcttgggccacacataaaatacactaacactaacgatagctgatgaacttaaaaaaaaattgcagaaaaatcttaatgctttaagaaagtttacaaatttgtgttgggccacattcaaagccgtcctgggctgcatgtggcttgcacgttatgggttggacaagcttgctctagtcagtgtttacactttagaagtcctcacttccccttcccaaattccatttggtgagtcccaggagagactcccatgagctccactccatggttcccatgggaaaggcagccttctattcctagaaatggaatgtggtgctctgtgctgttgaattgcaaagctttgtggaacagttttagtaatatatctggaaaggcttctggcacttagaaattaaaaagcactccatgaatatagggcagcattagcatatgcatattaaaatctagtcactcctcagtttttttattttttattatagggaacaaagaagtataaagtataaaaattaccaaaaaaaaaaaaaaaaaaaaaaaggaaggtcaaatggctattctggaattttcttttttttctttttttaatttttgtttaattatactctaaattctggaatacatgtgcaggatgtgcaggttttgttacataggtatacacaggccatggttgtttgctacacccatcaacccatcatctacattaggtatttctctggaattttcaacagatgtaggggccaacaggtatgggggttatggtggcaagacagggtttgagactgggagaagaggaggcctggctaacaaaggtggtctttctctgtagatgaaacatcacaggtagcagccctcagagacaatagatgacaaatgtttctttcagacctttaaatgtgtcagacactcagccgggtgctggtggctcatgcctgtaatcccaacactttgggaggccacagggagtggatcacgggatcagaaattggagaccagcctggccaacatggtgaaaccccgtctctactaaaagtacagaaactatctgggcatggtggcgggcacctgtaatctcagctactccggaggctgaggcaggagaattgtttgaacacgggaggcagaggttgcagtgagtggagatcacaccattgcatcccagcctgggtgacagggtgagactccatctcaaaaaaaaaaaaaaaaaggtgtcagactctcagttcatcctttctagatccagacaagggagggcctcagagaaagcctgctgcatcagtgcagattctatacagatgcgaatctcccccacacaagacagttttgcaggactacttctgtttcaagtcctctgaaaaaccatctcaaaatagctcaaagaaatatattttggaaaaaagatttttatttcctttagtaccacccccaaccctgccctaccttttgaaatttttctttcagaaagtttctcatgttaagaaccaacttgatagctttagagagatttgttttagaggctggtagataagagattggaaaggaggtgaggaacaaattgggataagcagaagagagcaaatttaaatagatcatctcatatcttcttgaattagtttcttagtcctgagaataggtcagttcagttaaattgctgtgtctcattccaagaggtggtatcgtagatgagctagggttctatatatgatgcaggcaaacagatctttaataaaagacattttattggaaacagaagaaaaaagttaattcatagagttgtctataaactagttctagagtttcaagttctggattttctggctttgtacattttcctatactatagaatcaggtgttctagtgaactttttaagtagtccatgcatcaacagacacaaaggctgtttatattgcaagttgctgtggtgatttctctggaagtttatatcaagttttctagcttcagtttgtagggcattaagaaaagcagttttattttttagtgatttcaagtcagaaaaataggagaaaaattagaaaatgtcggtttggagacttatagccaggaaagaatttagcatttagatcaaattgtagacaaataataactaaaaaacaatggtcagggctagaatctaatgtcacatgtactatagttttcttctaaaacatattttttctctataatctcccatttgtaccaaagataaatcatagtgaaaccaatacatttgcaaaataagttttagtcatattgtacttagcctgattatttatataaagtacagcaataataatgattggccatatagggtcttttcaagttggttttgctggaactttttcataaggaatctcagattagactttaaaaatgctcttaatgtttaggagccaagccaaagtttgtaatacttgtacagatttggtgaattaatttctttctttctttcttttttcttttttttttgttcctaaaatatcttgaagttcctgtacctgtcaaaaagtgacatttttttcttatcacaaggttaggaaccttgaaagggaacagttgaggcaagatagtaggttagtctttagataaagaaaatgtggtacctatacatcatggcatactatgcagttataaaaaagaactagatcatgtcctttgcaggaacatggatgaagctggaagccattatcctcagcaaactaatgcagaaacatgttctcacttataaatgagagctaaacaatgagaacacatggacacagggaggggcctgttgggggagggcaggagtgggagggcattagtgaaaggagctgctgcatgctgggcttaataacttggtgatgggttgataggtgcagcaaatcagcatggcacgtttacctatgtaacaaacctgcacatcctgcacatgtaccccagaacttaaaaaaaacaaaaacaaaaacagatgactggacacggtggctcatacctataatcccagcactttgggaagccaaggcaggcagatcacaaggtcaggagttcaagactggcctggccaatatggtgaaaccccatctctactaaaaacacaaaaattagccaggaatggtggccagcacctgtaatcccagctacttgggaggttgaggcaggagaatcacttgaacccgggaggcagaggttgcagcgagctgagattgtgccattgcactccagcctgggtgatggggcaaaactctgtctcaaaaaaaaaaaaaagatagtaggccactcttttttagtctattggctttaaagtcatcctcaattcctcaaagcagtctggtcacatttaaaatgtgacattccagtcaaagccttggtaaaataaccagtgtctgtaattgtgtcctgtcactgaagaaaatagattcttattaaacttacacaaatacatctattgccataaaataaaaatactcacaaatagtttctgcattctggaggaatcgggtagagagaaaggtaaatgtttcaattttgttcacaaaagttaactttactcaattgctgtaagcaatataagaggaaaaaaatttcttgactagaaaataacataaaaagaacaagttttttttttttttttttttagacggaatttcactcttgttgtccaggctagagtgcaatggagcgaccttggctcaccacaacctctgcctcccgggttaaagtgattctcctgcctcagcctcccgagtagctgggataacaggcatgcaccaccacacttggctaagtttgtatttttagcagagacagggtttctccatgttggtcaggctggtctcaaactcctgacctcaggtgatctgcctgccttggcctcccaaagtgctgggattataggcgtgagccactgtacctggcaagaaccagtaatgttttaaagtgaaaactttaaaatcatttgccttgcattagttcagtttcatgtaattagttcttctgcttgatgttaggttagcattttatgagtccagtttttctctttgaaggttttagaatttttacccgatccaattatatgatctcacagtcataagcagaggtcattatttcagagtatctgtcactttcctatccatgaatttacttgaagaagcacaatgtttgaatagtagctgattataaactgcatttttgtgaagaaacagagtgaaacaatagttgtgaataaccaaaatttagaatagccatcattaaagatacaattgacaaggaaatttgttatttctgtagcaaacaacaatttaacaggataatcataactatgactgataacatataacaagacatatcaaaatttttggaatctaacacaattttggaacacatattaacacatttatacaactataactcagagattgttaaacactatttcttattaacaatacttcctgtatgacttttacataccaaataagactaacatgtctctgttggacttccaggggcttttttttttttttttggaatgtctaaaagttaacttgagttcaaaaggacatgttagaattaattttgggaagtttgtcaaatatcaatggtttgaaacacttgatattaaaaaagaaaggtttggccaggcacggtggctcatgtctgtaatcccaccactttgggagaccaaccaggcagatttggtgtttgaaaccagcctgtgcaatgtggcaaaactctgtctctacaaaaaatacaaaaattagccaggtatcgtggtccacacttgtagacccagctactcaggaggctgaggctggagaatcacttgagcccaaggagatccaggctgcagtgagctgtgatcatgcctgggtgcactccagcctgggtgacagagcaagactctgactcaaagaaaaaagaaagaaaataaatttttaaattattgctttggctaaatgactactattttacagttatgttgatcctatcttgatcaattcttttaaactttttgttgttgttgtttttatgagacagagtctcactctattgcccagctgagtgcagtggcatgatcatggctcactgcacctcagcctcccaaacagctgggactacaggtacatgccaccacacctggctaatttttgtattttttatagagacagggcctctccatgttgcccaggctggtctcaaactcctggcctcaagcaatccacctgcctcggcctcccaaagtgctggcattaggtgggatccaccataccaaccttaaagatttgcaaagcaaaacctttactcctttgatggggcagttttccaaataattaaaagatttcataaagacagaataagaaaatgtgctcctagttttggggtgggggaggggttgtagtttatttaaaaggtgaacaaaaatattttattatctattattaatatgacataaaaattttgttgaaaagaacaaattttatcctttttatgtatccttaatattaaagttaattttaagaaaactttataaacatctaattttagttttggcaacacaaaataagattctgtaaataagattttataaaatattttatttcatttcaactgtattttaaatttaaaacaactttttgaaaacctttacactagaaaaaattactttctttttaacaaaatccatatgttgatgtctttttgtaatgttttattaaaaagacattacttttcttatatctatactttgtgtatagaattttaaaatatttagtagtttcaataatatattaattacaattttagctcttaataaccctgatttttaatggaaaacctgggaagtaagtaactgtgattgttatgtgtcaggtgcagagccaagtacagagaacaggactgtgaagacagtatctggaggatctgacccctattagcatagcctggaaacagctggaccagggagaatagggcccaggcactgtgaacacacatgtgtccccagtcctcatcatggccacttgtctagactccagaatctaaacactcaaaaccaagacataagttcagagacaaattaagctagtattaatattacagaaataagagttttatgaccctaaaacatcaactagagacaatataaaccagtctgaccaacagacccaggcaaacatgtctgaattaaattttgaagatgtttttattttattttactaataatttttaaactagctttatttattaaagatttctaaaatcacactaacttgaaagtatttggacatacttacgttatgagtacttattaatttatgtcaatctggtaccatgtacacaatatgcaaacacagacatgtacatatgtgcacagaaaaatacacaaatatagattttgtagctttcgtttaaaaattttagccgtgaaacaggtaaaactcactagtttaaaaggatagttaaattttgcctctgtaaatggaatgggttaaagtttgttccacatggctagaagcccttatcacattttggagtaaacaaggtagcaaatttacatattaaaacacagagagaatttaagctctttaaagaagtttgggtatattaaaggaagattaaaaatgggtatcaaggtaaaatcataggaataaaaataaatcataagaatttaccataagattttacaaggaaaccaattttatttatcagttagttttaaatttagtcttcattttccaactaggccactgagctcagggcagaacccaataacaaacggagcgaaaaaagcatatgtagttttcagggactgctgtggtttgtttatccccacgaagtctcatgttgaaatttgatttctaacattggaggtggggcctgatggcaagtgtgtggattgtggaggtaaatccctcatggatggcttggtaccattctcatggaagtaaatgagttctctaaccctttgttcctgtgagaactggttgttgaaaagagcctggcaccttctcctctctcttgcttcagctctgtcaccatgtgagctctgtacatgccagctcccttccttttctttttctttttttttttttttttgagacagagtcttgctctgtcacccaggcatgcagttgcacgatcttggctcactacaacctctgcctcccaggttcaagcaattctcctgcctcagcctcccaagtagctgggattacaggtgtgtgccaccccacctggctaatttttgtatttttagtagagataggggtttcaccatgttgaccaggctgatctcgaactcctgaactcaggtgatccgcctggcttggcctgctgaagtgctgggatcacaggtgtaagccaccacaccccgcctacccttccttttttactatgagtggaatcagcctaaagccattgtgatggttaatattgagtgtcaacttgatgggaattgaaggatgcaaagtattgttcctgagtgtgtctgtgagggtgttgccaaaggagattaacatttgagtcagtgaactgagagaggccaccccaccctcaatctgagtgggcaccatgtaatcagctaccaatgtggctagaataaaagcaggcagaagaacgtggaaggacttgacttgctgagtcttccagccttcatcactctcacatggtggatacttcctgcccttgaacatcggactccaagttcttcagcttttggactcttggacttacaccagtggtttgccaggggctctctggactttggccacagactgaaggctgcactgttggcttccctgcttttcagattttgggacttgaactggcttccttgctcctcaacttgcagatggcctattgtgggacttcaccttgtgattgtgtgagtcaatactccttaataaactctccttcctatatacatctatcctataagttctgtccctctagagaaccctgactactacagccatcatcagaagcagatagtagatccatgcttcatgtgcagcctccagaatggtaagccaaataaacctattttcttaacaaatttacccagcctcaggtattcctttacagcaacataaatggctaagacagagcctaatacctaaatatgtggaaagcaggtgcaactggaaggcagacacccaaaacttcaagggtccgatttttacactgtcgtttggcaccctaaatagaaggaaatgtcatgggactggagagtgtattgctttcagagtataccttactgtaaggacatttctgtaaggctgctgggtgacctcatgttaatcagcccactctgtgatcagcctgtctctcatgggaatcttatccctcagtagcaagtgtttccacagcctctaagtgtttaaactgtaccctttttatctgaattcacaaagaaataagtagccccttgtagaaataaccatttacagcaactgctgtcagccacctccaaaactatggttctcaccagtgactagtcagtcaccatacacacaaaggtcaagttttcttttacagtacaatgtaattccttgtaaccaccccctcaaccaccaccaccaccaccaccaaaatgaaagagatcaaggaatttaatacaaaagagggtagagctttagacctgacaaaaactggcccaggactttagggactccaggaggaaaacagaagacccccaaaagaggatgtgtggtgtttttgctgtgtttctcaaggagtctcagggttgctagaagtctctcagatttttcttaatgtggtcaaaggtagaaaaaaggaaaagtaatacaagtggaaataaatggaagaacaagtcttagatgagccaatttgggggagattttgagctttttaaaaggccaatgaagtttacatgtttttggttttggggtttgtttgttcattttaacaaaaatcataccaatatgaatggaagcaaatgagaactaaacctaatttaaaatgggtttcagttgactgaaaataacttctcagaaacaaaatccaaaagagaaaaagcaaaaacacttctaaaaaatatatttgccacttaaatatcagcttttaattaaacttctgaccgtagagatatcttctaaaatctctgattttcagatgttagcagcaacacacagctgatattcctggcttttgcactttttaccaaaggtgatctcccaagtgacttaccaaaatcaaagtcttgaccaaggttatgacttagtcaaagatgcatgaggcctctctaaagagatgtaaagcagtcctcacaagatctagaaccaccccaaagagagttaaagaaaggaaactttcactagctgcaaatggagtacaacccacatctgtctggccatattctctaggatctcagcttctcagctgactgtgaacacataaagacccaaaaagactcgtatgcccccacagacagaaggagacaggaaatcaaaagctgtttaaaaggggaaaagaatcaataatcctaaaaagtgaaaagtgacacaaatatcaaaccaaaagggactggtttcctgactgagaagcaaacccaggccaaagtggtgaagcatggaattttaactagacaacaaggtggagtggctgtcattaaaatacaagggattttaactttattttaagtcagatttttgctcttcaattttgtcaagacaatttttaaggctatccacgacattattatgtgtcttttaaaaaatatgaccatttctccgccaaccatagtctatggacctttttacataattgaatattttcaattattgacattttgtgtctaaaggttgacttaacatgagatattttcatgcaaagtcttcagtggttgtagagtctattgttttgtgaataaacaaatctgaatctattttatatgatattaaaaaatttgatctcataaatacaaacaagacaattgcttagaatgagagtctaaaatctttttttaatttaggggtctttccaatttaacaaatccatcatttggccactgacgttgagaatttccaatggtgtacttatttcaatagcaacttaattcaataagtctttttatcgaaagcccagggggtaatttaccaggtttagaacaagtttttagttttctggagagggcatagaagagatggtttcaattatcccccaaaatctactcccaggaataggctaaaatactaaaagactcttgttaccacatgtggttaaggatggtgtttgtgtgtacagtgcctccactatcccacatatttgtgggaggctgccagtcacagacacattaatctgtgacattggctatgccctcctaggattggactttcccagggacagcaagggttgagacaacaaaagctccttgtgaatgggaccttctattaagacaaatccccctgagagtttgacatgttcagaacaaaaagtgtgtgctggcagggcgcggtggctcacgcctataatcccagcactttgggaggctgaggtgggtggatcacgaggtcaggagttcaagaccagcctggccaacatggtgaaaccctgtctccactaaaaatacaaaaattagctgggcgtggatggcaggcacctctaatcctagctacttgggaggctgaggcagagaattgcttgaggcagagaattgcttgaacccaggaggtggaggttgcagtgagctgagatcaagccactgcactccagcctgggtgagagagtgagactccatctcaaaaaaaaaaaaaaaaaaaaaaatagggtgtgctgatatgtctcagggttccaaatttttttaggctggccaccaatttgaaccaaaaactgtatccctccctctgccatgatggcagagaccaagaaacaatgctcccacttgttcacaagccaagctctcaaggacataaaacaagataagaatggaacctcatctggtttttatatcaaagactcacagcagtttgtctaaataaatgccagtctggtcagaactgcgaaactggtcaatccacagggctggcctgaacaacagacatatgagggttttaggtttgtgttctaccatatggtaccccactttatgataggcaacacaaaaagacaaagaaaaataccattttggggagaaaaaagattcaacaatatgaatatttataccaaaaggtacaccagagtcactacaccaaagactagtcacacaaatccttttctcccattagtcaagattttaaaggggcaaaagaaacagtgatttttaccatccatttgaccagactacacagagagagaggcaaggagcttagctggtagaaatttcttacccttctgctggcatgtctgatcctgagttttcttgtctgtggcttccagaagagcagagttttggtatcctgctcacagtgccaaaactataggggccaagggaaaacttcccctttgccctgtgaagggtcgcttaaaatcagctgacaagaaggcagatgaataggagaaatggcatacaaatctattaacaagcagaggagagaaccacagagtgattgccccaacctcccaatagggttcagaagcttatataccatactgaggttacagaaagaataggggcttgcagcctggcccaaaacaggttatggtggttgctatatttggatgtttgtcccccaaaccctcatgttgaaatttgatacccaaccttgggattagggcctaatgggaggtgtttgtcatgggggtagagattcctcaggaatagcttggtgtctttctcatggtaataagtgaatccttgctctaatagttttcatgagagccagttgttaaaaatagcctggcacctcccctctcttgctttctctcttgccatgtgatctctgcacatgccgtctctcctttatcttccaccatgaatggaagcagcctgaggctttcaccaggcaccagacacactcttcccagccagccgagttgagagccagatacacttttttgttgttgttgttgttttcaaatgtttattttatgtacaaagaactatcatggcttttcattgagtagatgccttggatgatcctttgaaggaagatcatttagtccaatttaatgaaaccgatatccttcgcgtactgacggaaacactgggggcacatattgaggccatatttctggatcagaccctgccggtttgaacagacgcgacaagagcgagaaccctggccgaattttcgcgggtggctccagtacagctgctggtgacccaccttgctctcaggagtgcaatgaggtaaaaggccagatacactttttttttctttataaatgactgagtcttatgtattcctttatagtgatacaaacagatgatgacaatggtaaatctgactatggtggtaagacagggtataggaggggaagaagaggaggcctgactagcaaaggtggtcttgctctgtagatgaatgaacctcataggtagctgccctcagacagagtagatggtaaatgttttttccagaccttgaaaggtgtcagactctcagttaacctttcctacatccagacaagggagggcctcagagaaagcctgctgcatcaatgcagactctgtacagatgcaaatctcccctacacaagacagctttgcaggactacttctctttgcaagttctctgaacaaccatgtcaaaatatgtcaaagaagtatgtttggggacaaaacatttttattcccttcaaacaggcgtataaaatggctttattccttatgctgtttgaacatagcatccgcctatttctgtgtgagctgacccaccgtaggccattgtattagcctcttttcatgctgccgataaagacacacctgagactgggaagaaaaagaggtttaattggacttacagttccacatggctggggaggcctcagaatcacggcgggaggcaaaaggcacttcttacattgaggcagcaagagaaaaatgagaaaagcaaaagcagaaaccgctgataaacccatcagatctcatgagacttattcactaccatgagaataggatggaaaagaccggcccccataattcaattacctccccctgggtcccacccacaacatgtgggaattctgggaaatacaattcaagttgatatttgggtggagacaaagccaaaacatatcagccatcatcgcaggttcaatgaaaagctagtttaggaaaatgctcaaattaagatttctgaaatatcccctttcctaccacatgtccagtgcattctctcaccggagagtaggacttaggtggcaggggctgaaccagcatcacctctactagtcttcttatatgcaggcaacaagactgaagaagggaaagtgaattgagattgcaggcaagagataaggttgtttgtcaagaaaaaccccgatattgatcatatctatggagccacaagtggaagccaaaagtggtcttcccagtgtgttaatctctgggaggtgttcttatcttccagcatctactcccttctagttatctaattgcattgtaacaaatctttatgacagaagtggaatgcctctttctccctccctttccccacctccccttggtatgtgatggtagacagtatagtgacttcgagtgtttatttaactgtgcatgctttttctccatcgtctaaacatccgccaggaaccttgacattagtttcacctctcctctggggctgagagatgggaaagaagcgtcaagaacttgaacagaaatccagctctcagtacattgcagtaagtaatcactttctttttttcctttcagagtaaaaaaacctgtttcaaactctcttcagggcaaccaatgaattaaatatcctactcattgcagacatgcttcatatttcaccatgatgggcagtcttaaagtctctacttaactattgatagccattgagatcccagtaattcctgagacactcatggcagaatggttctaattattagacagctttttcctagactgagctgaaatctgtcaccatggaatatatctttcccttccccactaggcctagtttttctctgtattagtcattctgccaggcattatggaagatatcaaatagtgaagggcatgatcccttcatggagctttaggcaggtaagatataccgcatggaaaataatttatacataatataataatcctatgaagtaagtattatgctttcttaaaacaaatgaggaaaacacattcaaaaatgttaattgctgcatgtgttatagtgaaatgattgttcagccgggcgtggtggctcacaactgtaatcccagcactttgggagaccgaggtgggtggatcacctgaggtcagaagttcaagactagcctggtcaacatggtgaaaccccatctctactaaatatacaaaaaaattagccaggcatggtggcgggtgcctataatcccagctacttggggggctgaggcaggagaatcgcttgaacccaggaggcggaggttgcagtgagccgagattgcaccactgccctccagcctgggcaacaagagtgaaactttgtccaaaaaaaaaaaaaaaagtttaaaaggcagaattactggagtgctaaatgggttgtataatggatgtaggatttgactggcattctaaaaatttgagtcatatgggtagtttacttcccctgatcaagtagatgtcaaggggcacagctgagagctatcttcaaggaggacaatgtgtgcacatggtgacactgtctgttaagacactcaggtgttgtctagatctgatgataaattaattagtttatggtattatttatctgatgattaatttatagcaggaaggacttcagctaggcaaaagaaagaactatgaacctagctggttgctaaaaaactggaagttactaccaatggaaatgggtgacatctccatccttggagatcatcagaggtgaccagacaactacaggttctaatgatttcaacattcagctgcccgaaggcaggggcctggatggaatttttctttctggtacctttcagatctgagaatctgatcctaattcagaggtagaggaaaacaggtaaaatatttctctccctaatgtgatagcaagtaaaaatgaaaaataaagggcctaaggctggctgtgatgtcattcacctgtagtcccacctacttggggagctgagagaagaggagtgtttgaacccagaagtttgtcgctagcctgggcacatagcaagaccctgtctttataaacaaaacaaaataaaataaaaatttagaaaataatagaagacctaattctccttcttgaaaacaaaaataagagaaaagacacacccccatcaaccctgccctgcaatcctcaactcttttttcagaacttttctgtccttccttttcaaatgtatataaatcttctctttggctaaataagtttctcaactcaggaatgtttcctgcagggcctgggagtcatctttttgaaatgcaaacatcacggaagatagtgtccctatctccgagttcctgtgggagggttagagcctaacttcagtgggtaccttgccccaatttgcaaaattatcttctgtcataaagatatggaaattttgtttttcctccaaataaagccaacacaggtggtctccccaattaccaagataaagttaggacaaactgtgtgtgacaaaaggtgttgtctcttacttaaggactagtgattgtttatcttgggagcatgaatgtactgggttgtatctgcttggctgtacaaggggggagtttcctttctgcctttgcaatctcttagcaattgcatgtgatgcacatcacattctggtttaatggttattcaataataaaaataaacggttattcaataataaaaataaaaatgttttatggccaggtgcagtggctcatgcctgtaattccaacactttgggaggttgaggcaggaggagtatttgagttcaggagtttgagatcagccagggcaacatagcaagaccctgtctctattttttgtataaaaattatttaggctgggcacagtggcttacgcctgtaatctcagcactttgggaggctgaggcaggtggatcacctgaggtcgggagtttgagaccagcctgaccaacatggagaaactccgtctctactaaaaatacaaaattaactgggcatgatggtgcatgcctgtaatctcagctactcaggaggctgatgcaggagaatcgcttgaacccgggtggaggttgtggtgagccaagatcgcatcattgcactccagcctgggcagcaagagagaaactctgtctcaaaaaaaaattatttaaaaaattaaatttaaaaaaagtgttttgtttctctactacctttgtggaggggatttctgggttggacaagatcttggtttttttattttctcaatttttgtgaatgaaggtaagatgactggcagtttctgaataaagtggacaactgaaggtctgtgtccacacagagtcaggtaagagaccctgatttttaaaaagtctcccatctacctctctacttgtttggaatactaactggatgataccaaattcaagctgttgctactgaataaacatgggaagtacaggctctaaaatctcatcaagatcaccattaggttcatggtagaaaaatatgggatgccaggaatgttgcctgtaggtctctcttgaatggctaacatatctctcacacatttggaatggatatacacatcagatcctagtcctgcagtggcctagggatagctcttttgatttggataaattaccgcatttgcagaagttctcggaagggctttatgtcaagcaaatgagttactggtatttgtgggatgaatattattctaagaggaaacttaaaagtgatttagataaccagagagaaagactgaaaaaaaaaacaatagaacaggaaatacaaaaattaagagcactttctccttcacagaaacctcctcctccattgcttattcttgttccctctgttcctgctgcctcactttatccctccttgtctcagactcctggaaagggatgtgtgatgagcttttagacaaggggttttcctgtttagggggttccatgagaagagaaaaaaggatgtcacttttccagctgtaaatgagttacctgccctgcttgaggacgtagaattgactgccccctggcctatccccaagtccacttcttgccttagaccagatttcacctccagggatctcttctcatccacacaccatttagctagaaaggtgaaaaagatgaagataaataatcaatatcctggaataattgagaactcagataagagactgtgtccctgtatgaaggcagcaggatggagagttacttggaaaaagacaaacaaaaagatattaggttcataaacaccagtatggaaaaacaaaccaaggtgccatataatcctccctttttcctattttaatgcatagaaaaccagccctttttactcagatcaccagcaaatctgaggccaccgagaagctccccaggccccttgggcgcaaaggaaacattaagcatctatgtgctcttctcccctgccgatatcatccatctgaaggatttttcccgtaccctgggaagatacacaaaagtttgcagaaatgctccacagcttgtttttagtttacagccctgcacatagggatgtgcactgactcttgtgggtaatcctgcaaccagcccattttgcttgtttgaggacctggagatgatccaccacctaaggtggcactgtgaccagaggaaattgattaccactcccctacaactacggaactgagcacgttagagatccatccagagcgattgctagaagcaatccactaaaggtaagctgggagaagttgcaatggtgtacctagaagaagaatgagtcctccattgatttccagcagcagtttttggaggctttctcagaatttactagcatggacccaggaggagataaaatcactccctaatcttggcaacctttacctctgctctcttgctgactaaccaagcccaaattaagcaaaaggtgttaggatagcaaggacagactattattcaaatcctagcagcagccactactcagtttagggttaagacaaagaagaaaagcagagattaaagactgctgtgttggctactcagtgagaattattactaaggaggataatccctataccgggcaaagtataaatatagcaaaggaacaggagaaaactgaatgttattattgcaaaataccaggacattggaaggactatagaaagagactcgggaggataccaaaattgcagagacaggagagtcaggaaagcctagaaagatgaaaccctcaactaggaaatagttggcaaatggctcaaaattgacagattgggggtatctcagaggtgggaagtggtaaaccatctatgtcaaggacttttactgaaccccatccatccttggcttttctggtagatattggtgctacttattctgcagtttcctcagaaaattcctgctttccatctggcaactgattagtacaagttgttggtactttggatcagcctccatttattcctttttctcttggattcccaaacagacaggtgctcttactgaggtaccttcattctgactttctcctgtatctcctataaacctattggtgagagacctactctgcaaattaaaggctactatattttgtactccagatagcctattggtgaagctccttgaacaaaagagcacctgagatggttactatgttcctcatagaagaaaagggaccaggcatggtggctcatgcctgtaatcccagcattttgggaggctgaggcaggaggatcaggaagatcacttgagcccagaagttcgagactaggctgggcaacatagggagatctgtctctatttaaaaagaaggaaaacaagaaattattttatttatttatttatttattattttttgagacagaatcttgctctgttgcccagatggagtgcagtggcgtgatctcagctcactgcaacctccacctcctgggttcaagtgatacttgtgccttaacctcctgagtagctgggactactggtacgtgccaccgtgcctggctaatttttgtatttttagtagagacaggggttcaccatattggccagactggtctcaaactcttggcctcaggtgatctgcctgtcttggcttcccaaagtgctgggattataggcatgagccactgagcctggccagcaagggaataatttaaaaaggacattcaccctgttatactaccatacttctagtgaaaaaggaaggtaagtttcatagagatatacagatttgcatgagatcttggagacataaataaacttactgttccattaactctgtggtccctaaccctgtaactattccaactttggtactgtcatctacaaatatttttttctgtgattagtctatattttgctttttcttctgttcctctagtgggcaagtctaaatgtattttgcttttacttacgaaagagcccaatatctgtggcaaataattcctacaaataatgcctccctactattttctctagttattttgaggaaaacttagataaatttgttccaccagaggaatctataattaatcaatgtgtagatgattggctggtagcctcagaaactaaagagcaacacaaaatgtattaaagcatctattgtcagctgaagactgtaaagtgttacagtctaagagtcaaccgattttgaatatcaaacagctttctatagagaaacaattgagacaattttggggattagtaggacattgaagacaatgaatcccaacttctgctgagtgtgcaaaaccttcgatgagcaattgcatgataactctctctggcctttaaaatctgaggaggcttttgtacaactgaaattagctataacttctcccctagtcttgaggattctcaattttgaaaacctttccacttattttgttatgaaaataaaggtgctgctagtgaaatattagcttaaaagttgggattgaactatagggcaatagtttatttatcagttctaggagccactgcactgagaatgcctgggtgtctgcaagaggaagaggtagccagcattcttattggaaaagcccaaagtcttaccttgagtcacatgacttatttgcatgtcccacatgctgtgacagcaatcttacaagtccataaagcctagcatttgtcagtatgccattgaactaactgtgagcaagcattattaggtagtcctaacatagtacttgggaggtgcaatctcctaaaccctactacccccttatgagattctgattaaatagatgatcatgactgaacaatggtaatggaagatattaagccctggcctgatttattagacttccagtttcaaaatgcagatttgagtcatggtcctgggctaagaaaggatgactgaagactttctgtggtgtggtgacttctcatgaaattttggaagcttatgttttgtctggaattaaatcaacacaagcagctgagttaacagcagttactagagctccaattcttagttatggactggtaaattaagttttacctaaagctgcctttttacagattttatgttcagcctaaaggcttttctatacatagtgaactgtaacctaactggatgtgtaaacagactataacctactcttgggacaagaagccaagtctcagcccatcacagcagccatacttcaaccactcacaggtgaccaactattcaaaccgtgttcaaataaagcaaatgccaaactgtaaccagtttggctgcttctgcacctcacttgcattttgtgtacatcattttcctttttctctccataaatcctctccaaccacacggcagcaccagcgttgctctgaacatattctggttctggggactgcctgattcacaaatagtcctttgctcaattaagctctgttcatttgtccaaaggttttcttttaatagatggtgtcagaagtagaatctgaaatacagcttctagtgacccccaggagcatcaagtaaccaaacaaggtacctgctggccctattttgttcattgttttctcacagcaactgtgaatcatgggtaagctctcttggattctgtagctacatggatttgtgttttgagctacctgagcttgttagagcacatttttatccaaactgtgttctggagtttacaacaaaatctgtactgggtctaggattagattggatctgataattaactgcttgcatccagttagttgtcttggctgtctgaccgtgtcagacaggaactgtcagtaaatcgcaatactgcagggggtctaatttttggcttccagaaatttttcagattttttgtgttctatccccttggttgttgttgttattgttgtttttcttgcactgttaggtaggggaaaattcattggctaagttgatcaaggggatctaaatggtcaaggtaaaaatggaatccttaatttctgaagaactgaatactcccccttctgactatgcctacatttacatgtataagtattaggccctagaaacagcaaatgcttacaaaaatggtgaaatgttactaaagatattttaaaattacagtggaatgttccaaatgaaaaacattgcactttaaaaagtgcatttaaaaatgaaagctcccaaactaggctaacccagggatgcctatttatgtgcagaagtttctgaaaagatttcaatgtttttattacctcttttaaaagacctttataaaaggcaaataaaaagcttaggcaatgaattgataggaaaaatgaaatctgctaacattttggcttaataattattccacccccaaatgtaaaaagaaagctatcctggataaagggtttataaaaggtagggcctcaggtaaagtagacttgctttttcagagctatttgtgctgagtccagacgtacagaatgctttctttgccctatttctcaatgtactccaccctgaacttagtaattttagtgaagaaacagtagctaagttaaaaaaagaaaaaaaaaacctgcctattgaactaaatcattctccaaaatatacctttctgacatttagctggctgctttgaaatgcttttgtaaataaaagttacatctataaaggaaatcttcatttgtaagaatgcctgcatctgtgcacttggaaaagagggaggactgagtcactagaaactcttatcattggtttaaatttataaaacaaatcttacctttgtttaaggtgctttttcttcccatcttgtcttaactaggcctttacctatatcctgatcccttggtttgggcaaattatagtacaatatttaggtctgaagtctcagttctctgatttttgagatatacatttcctaccttatttgacttaagagtcatcctattagaaatgcaaatttagggttgcctagctaatgattgcttagaacaatggaacagataattggaagattgattgtcacaatggggaaaataaaaaaactatttgagagctggcaaatgagaatctttatgaaagctataaaatttgcttctgttatgtgtgtctgtatgtctatatgtgttatgtgtatgtaataatatttgatttagaaaactagtttaaaaattattggtaaaataaaatagaagtggcctcagaattgtcagttaaatataattcagacatttttgcctggatctactggtcagacaggtttatgttgtctccatgacatgttttaaagttatgaaactggtatctttgacatttgcttaatttgtctgttagctaaaactgtaaggcatggatgctgggctacactgaagccttgtatatgtcttactgcgagcttgtttttttattttgagcctctggattctgggatctggacaggttgttacaataggtagctagtaagatatgagcagagcaggagagccctccctcccccaaccaggaatgtcaggtgactatcaagtgatggtcaggtggttgttaactgtctctctaaaatactaattggtttcagccagtgccaagaaaaggcagtctatagatagaaaaacctgaaactggtgatcagcagcttcctgataagatctcaggagttgggcgtgcattaagaggcaaaatggcggagtttaactggtgtatgaccttctagggacatttagtaggggaagaatgcctcaggtgagcatgcatacatctccagtaaacacactgcacttgctcctcttccaagtgctagcagtgccactgttcatgtggacagccaacccaaaggaagaataacagaagaagggatgcaagaccccagaagtatgccaacatataaaaccccaagtcaaaggtcaaatcatgcacttgatctctcaagtcatctccttggcccttttccaaatagagagggtcaagtatttccaaatgtattttatttccttttgttcctgctgtaaagctttttaataaacgtcactcctgctttaaaacttgcctctgtctctccttctgccttatgcccttgagtcaaattctttcttctgaggaggcaagaattgaggttgatgcagacccacatggattcactgctggtaacaaggtgaccatggtgaggcctaggaatatgtcctcagtgcctggaccactatctgcaaagcagagccaacctccaatggcacattctccctgaaccagtgttgccagctggccatgccgggaggggtttgatcctccaggtgtcatcttcgcagttgtcatctatcctgagctctatacctgttatgtaaattcaagacccagatgagcccttcactatagaactgccttgggtgccacatgggtacttaggacccaggatgattagagaaggtattagggagggtatctatgtcataatttaaaaattcttttcagtaattaaaaatctttaatctgttaaattaaccaatagatagtcataaaatgtttgagttatttctaagtaagttaaaatatagaaacattaattatttaacctaagtttaagtttatatatcttggcatcttatttttacatagtatagagaagctaaatatgtttagatctgttaataaacaagaaaaactgaagaaacatctttcttaaaacattaggaaatgattttcatctacaaatactgatataaaacagttcaaaattacttcctaggttttcactagaaattagggttattaagagttaaaattaaagttaatatatgtcaataaaactaccagatataatatacagaatgtattgtttttaaaaaggaagatatgtttttagtgaggaaagttgtaaaggcatgaagatgtgtatatgttgaaaaaaataattttgtctagtttagaagttatttcaagtttgtttcaaattgaaggaataaaatatgatatagataaaactacatgggtataaaaatttggggaaagaaaaaatagaaaaagtttgtgagaggctaaaaaagatttatgaaaatcttatattgtatgttcaaaagctgcctgaggttggatgaatttgtttgtaaggttttagtcaaattaactttagagttgataatacactaatacaatagcaaaatttggtttctcttaaagaagaattttatgtagtacgaataagagtcagtaaaatatttttattcaccttttgaggaaactgcaaaaaagaaaaggggaagagaagagagacagattctatcttatgctgtctttattaggccttcggattatttggaaaactgagcctcctctctatcaaagagtaaaggtttttgcttttagaatcttttaattatcactttgactaaaagaatgactattattttatagtgacatgtgatactactttgattaagtgttttatacttttgatgtatttgacaggcttcccaaattcaaatttcagattcaaaattaagtcattttgacctcacactaactttgggatgttacagtgggtgcctgcagcatccaaaacagggatcataaacaggcttatttgacatgttaaattacatgagaaacattgtcagataagaaataatgtttaaccttcttcaagttatgtttttatggatatgctattaatatatgtttcaaaattataagagattcctaaaattctgatatgccttgttatgttattggttataattatggttattatgcaacagaaataaccaaatttatttgtcatttttgtctttaaccatgactattttaagttgtttccacagttaactgcttaattctgatgcattttcttttttctttctccctttttttttttttttttttttttttagagacgaggtctcactatgttgcccaggctgatcttgaactcctgggttcaagagatccacccatctcagcctcccaaagcgctgggattacaggtgtgagccaccgtgcccagccctgatgcattttctgaaagctcttcagaagcaagtaaattgctaaagtattgtgtctcctaaaacgttcatggaaaggatagaaaggaccctgacatcatttgcgctgggtaagaattcccagaattctaatgaagagactgactggtttataaaactgctaatccaagcaagacaagaattaattgaataccaaggaaatactttgccagattttcatgctagataagccaataatgaaattgttaagatctgcagtttcaataaactccatagtccaagccaaattacctctgataactcatctaataaacagtgctatgcacctgtattggagaaacaaaattggtgtttacgaggttataaattagttgttaaatgtggactcatggagaacctggataaccacatggtccctcttacatccttaaagcctccactattaaaagctctgcaatttgtatatatggaagacaatagaaacttctggtttttgctacctgatgtgccatttggacatttatagagggattttatttctctgccattttcagtgcatgttttctagatgtttagaagctttttcatgcaagaagactgatggtataacagtggctaagaggttattaggaaatgtgtttccctcatggggcattctggagaaatctccaatgatagaggtatttgtttcactggacaagttgtaaaacagttaaataaagtttacagatacaacagcattagacaaagttaactgaattggctggatttccttggtcaatggtattgcagattgattacaattagatccactttcaatggaaaatataagttgaccccttatgaaatagtcactgaaaggtttgtgcccctaataataggacctcatgtatcctctgctcctaaactctgaaatgactaaatgctgcaaatctttaatgcattatgccaaagtgcactttttttttttcgagatgaaggaagcttttcatgatgcactaactgaagacaatgaaacccattatgatctagaacctggagactgagccttctaaaaacatcagaaccagcatggcacatgtatacatatgtaactaacctgcacattgtgcacatgtaccctaaaacttaaagtataataataaagaaagaaagaaagaaagaaagaaagaaagaaagaaagaaagaaagaaagaaagagaaaaaatcagaaaaagactgcccttgccacctacactgcagcaatagaatctctggtccatggagtcactcatgctaaatgtgacataatcaaactgaaacttgaaacttgaaactatggaagcagatagatcccaaagcagactacggttattttttttctgtctctctcctgaaacaggagactctagcataagaaagccccttctggcccggtgcggcggcttacgcctgtaatcccagcactttttgcttgagcccaggagttcaagaccagcgtaggcgacagaacaaaaccccatctctactaaacgtacaaaacttagctgggcatggtggcagtcgcctgtaatcccagctattcgggaagctgaggtgggagaatcacttgaacccgggaggtggaggttgcagcgagtcgagatcgcaccactgcactccagcctgggcgacagagtgaaactccttatcaaaaagaaagagaaagagagagagagaaagagagagaaagccctttctggagtaacccttacaaaaaagtaacctgaagtccttgttcccaccttacaaattccactgctttgctatttcccagtgggatttgagtccaaataagaacgtttatgatagcgacagagtgacatcaatcgcctaaagagaggatttgttaaattaagtttaacctaaaactgcctccttacatatttaaatttggtctaaaagtttcttcatataaagtgaactgtaacctaactggatttgtaaacagactataacctactcttgtaacaaatagctgaatcttagccaattacagcagccgagtttcagtcaatcacaggtagccaactgttcacaccatgttcaaataaagcaagcactgagctgtaactaatctggctatctctgtacctcatttctgttttctgttcactttcctttttctgtttagaaatcctccctgaccacatggcagtgccagagtcgctctgtacctaccgtggttctgagggctgtctgactcctaaatcatgctttgctcaattaaactctgttaattaattaatcatttaatttgtctaaagtttccattttaaccagacttaaagtgtatatatatatatgtatatatatacacacatatacacatatatatgtatacacacatatatatgtgtgtgtgtgtgtatagtcacactgatagtaactatgtctttggtgtctgtcatgcaacagagcaaacaattttttaaatagagggaatagaactgaaaaaaacctcctatccaattggtagctgatttattaggagttttacaactgcctgctcaggtatcggtagttcattttgctagcaaagcttcaaaagctgctgttaaaacacagcaatctccaaacttaaaaagcttcatttttaacacaatgagaaacgtttgttcatttttaaaacaatcctttgtaaaagaaaatagacaaaaggattataaaaggggctaaatgaaatttgaccgactatggaaactacctagcaaactaactcctatgccacagtacgcatttgcttggttagtattgtcatgtcatcaacaaaatcacctgaataaaagagggaatttaaagacactaaattctttctacacctaccaaaaagggaaaagtattcaaaacgtatggaaaagagatgtgctctttgtcagcagaattctatacaggccactcccaaggtaagccgaagaagttctccctggccagctttacgaggaacctggtggcatttgatttcatagagttaatgcctacagagagtgcttttgtctacttacggtgtgtgtaaggtctagatggcctgaggtcttttccttttccaaagctgatgctcaggcagtgataaaggctctcctattacacataattcccacttttgggatactaaagcatattgaatcagaggaagtcattttacttttactcttgttgagaaattatgcaaatgtttacaggtctctaaaagttccagtcttctgcacaagcagagcaaataaatgcaaaaaaagcaaaccaaaaatcaaaaccaaacattccttggataagattcagcaatctatcgggttaaattgacctagagccttatcaattagccttattacaaattagaatttaaaaaatagaataacccctgcaacaaacatggaatctcttctttggacttatatttgggaagcctatgaatttgagtctgaggccatatgatatgcctgacttaactgaatcctttcataatcgtattcagtactttaacaagcttctctcttctccccagaaaccctgagacaaagtcagaaagatctggaaagacctgccagaggaaatctgccacccctctggactaggagacttcatctacataaaagtgggctgtcaccatgctgggagggaccctttaaagtgctgtcgatgacccataaggctatcagtgcaaaaggcaaactgctgaatccaggcttcctatgtgaagctagcaccacaggacaggtggactgtgctttctacaaaggacctaaaactgaagttttctactcaactgaaaagaagtattctagaaaatgtattactattcctataggctgcctggctgttctgttcatgacggtggttattccaattactttgagaattatatttattagaaaacaaacagtattatttgttgcacttcttttttcttctgcactcccagtaaatgttcccataaccccacatcaccaatcagctttaaattatgctcccaggattaacatgatctggacttacaagtccaacaatttcatttttagcagagtgtaagtggggtcattttcactagtactgttcaataataatgaaagtaataaatatgcatccagacactcaagctctaaatttgacaccaagaaaagttaactggtttgattggaaggatgatgtagaaaggcatctaatgaatagacaaacagaaactgcaaaagacagttttaatgtcactagattcacaatgggatgcaagttctctccaattccagtacagatgaataaacaaaagtgaatgcctgttatatttaaaggttattcctccaaggcaaatattatactgaattttaaaattcatcatactgtgattctggtaattgcattgtttgcattttactatagatttgctgaattttcaggcaactgcaagttgcccagaaaaaggtacaaataattaggagattgtaatgtgatttttgtagtaacacagggaggtgattgtaagggcaaatacaaattaaaaataagaggcttaactctccctgttgaaaataagagaaaatatctcccctctttcttttcagaatttctttttctattcttttcaaatgtgtataaatctctatggctaaataagtttctcaactcaggaatgtttcctgcagggcctgggagtcatctttttgaaatgcaaacatcacggaagatagtgtccctatctcaggtaagagcctaacttggtgggctccttgctccaatttgcaaaactaccttctgtcataaagatatgggaagtttgtttttctccaaataaagccaacacaggtggtctccccaattaccaaaataaagttaggacaaactctgtgtgacaaaaggtgttgtcaagtcctctaacttgaggactagtgattgttaatcttgagaacacgtatgcactggggtgtatctgctgcctatgtaaggggatgagattcctttctgtctttggaatctcttggcaattgcctgtgagacccatcacatcctggtttatggttattcaataataaaagtggcttgcataagagcgtgaaggataaacttaaaagaaaactaacagtaaaggtggtttgtttctctactacctttgtggagaagatttctggttaattatatttcccccacactaccccaaagcatcagcaagtatgccttctgttgtgttctatggtattactgttttattcctgtttaaaaaaaaaaagtgggaaatctgctccaaacagccctatggtggcgtagccagcagtgattaatcaaacctatctgtgctttaataagccacccccaacccctagcccccatccccaccccctaaggacatcagtcaacagatgacttgagaagagcactgcatcattgttttctttctctctgtgtgtgtattcagatactgcttagttcaccagaagagccttgtccagctccttctgccaaccttaggtgtgaggcactttatctttctgtggcaggaccaagcccctgtagttcctatagtccaaaggattgatgaaagactctctgtgcctcctctgagagctactgcagccacagtttcatttgtgttattaaccttctgcaaagttggctttccacagaaatacaatggctcctcctgaaatgacactgtgtctgtgtatcttctttcttcccttatttaggattttttttccaaaggatcaggctgaggtcccttggaggaaagggtcttatccatttaattatcttctactggtgcatctttgccccacctctcccactttgtttaaagacacttgctttctctgcttgatttttaaagtcctcataaaatgggcaagcctaacctttctagcctgattctactgccccttcctctgacatttaagcatctagtactcagcactggcagatagttggcacccagatttttgttgaaaaaaaaagagatttcagcttctagaacatcctggaatatcctttggtaagcctgcctacaacttaagcactcttccaggaatgttctttcaccatggaaacctcccaagatttcatagtgaaatgggagagttccctgacctaccctgcaggacgtgtgatgggtgtggctcgtctgttcggccgccatgcatgctcaaaccacttacaggatgaggagcacactgatgggcaagtgcaggagctggggcaagcacttttgggctccggccccacggtagcatctaggggtgggtgcttgggactcccgaagcccaagtgggtgcatgtcacactgtgcttttttagctctgtcatctacaaacggcttaagtgttaaccacctcagagccctcttggtacccaggttcttatctggcatccaggaagaatcaggtctcacacggacttgaagaatggtgaatgcaggggttttattgagtgatggaggtggctctcagtgggatggatggggagctgggaaggggattgagtgggaagatgatcttcccctggagtttgaccatccagcggccaatctcccctcccaccaccccagccgaactcctctcgatgttcagattctccttctcttctgtccttctctgccacgctgttctgccactcttctgctcttctgttcatctgctcatggagcctggggtttggggtttatatgggtacaggatggggggtgtggtgggccaaaagacaacttttgggtgtgaaaacaggaatgcctattcccatttagggctgtgggttttcaggcttgagggtcaggcctttgccagggaactgccctcttctacccagtatttccctttctcctgtccatatcaatagcacatgctccctaaccccgcccctgcactaccaccaccaccactatggaaatcaatctctgccacatacatccacagcactttgatgcatgccatactaaaggtatcactagtctgcctggatcagtgatttatgtatgtgcacgtgtccttaccacactggagcccttgtgggactccacctgcaactgattcgcctttaaatctctgtatgcctgtgcttgacagaagagaggtaaatgtttgaatcgaagtcttgctctctttaggcaagagaaagaaatatatctagccctccctacctcccctaacacccctccctctcttctgaccatgcagcagccagcctgtgcaggagctgcccttgagaggggggaaaatgagagattatgacagtgtcacagcactgaggcacataaatatttacagactgggtttgtttatagactagaggagtgtgacagttctgcttcagccccttcactttagccacttggtgtgaggcaagcaaagcagccttacccactttcagctcccaagaggaccagggaggttctccacaagcccccatatgtggtgctgaccattctgggcccccaggtcttaggcacctgggatgctcatgaggctgcttggtatctgcattgcctgattcacctggagagaggaggctcagtatgtgtaacctcacctagccaaccagcaactcctattcatgactgcattttaaatctattgcatcggtaagaatggactattctgcccacaagtccttggatgtaactcattacaggcagggctttgcagcttcaagaacagatagctactttgcagaggcttttaaaaagcatttggtctcattcaggcaagtaaatattactgagtcccttcttttcctccttttcattcattctgaaacccagagggttgagaggaagtggacagtaaaggacagataggccccaggggaacctctagggtctcataccctaaacttctgcacagacaacaaggctttgcatttgcatagtaattgtttattgagctttcctatatgccaagcactgtgctgaatactttacatgcattatttcatttagctctcaaaaacaacaaagactccaccaataaagtgcatgtgttcaatgtgtgagggctcactgagttgcacaatgtgcaattggattacgtgcaattttctgtatatatgttatactacaatttaaaaagccctgtgaagtacatgctgttatcttttttcaaaaaagaaaccaagtgagtttgatccctgaatccaaactctttaccacaacgcactacaaagtatctctaagaattttccctaaacacaatggttcagaaggaatggcagcggcctcaagttaccatccccacaccaagatctggttagatgagctcaagcccactggacctggccggtctctcgcctacctgcctaagtcctgggaggacagagacctttatgaatttctcaccccaccaaacacagctggaccctccaggttctactttcaaaagccattcctaagctcccagccctcaccagggatgaatcaggggtgatgattcactttatgaatagataattttttttcttaaacaaaacagttcattctctgacttctttcaaaagtagtgggcttccctaaggataccctgatactgcatacataagtagccacctattagagatcctgaggacacagagcaggtgggagaagtgaacttgccctttacttggaagtcactgacacttgaaaactaaacaaaaagaaggctgagcatctctgaaatttcaatttaattgaatggggaaatatttgtttcacaataattttatgtgcataataacccttaagggcagtttctattgttcaagatgagggagcaggcagaatgcagaagtgttggattaaccatgttggtggattggcagctcctgcctcagggccttcgcactggctgctccttctacctagaaactcttccatcagatagtgccgtgggtgatcccttgcatccttcaagtctctgctcacacttcaccttcttagagagacctcctggggccattctatgtgagatccccccatcctccctctgtctcctttaccttgcttcatcttcctccatagttagtgtccccatctagtgtgtgcatacgcacatgatttcttggcaatgtgttgtctcctgacattggaatataagcttcacaagagcaagccctgtgtctcttttgctccctactctactctcagtaaccagaacagcatcaggtctacagtagctgttccataaaatgtgttaaataaatagttgcttccaaagtaggtttctccttttgggaattctgtgtgttctgttctcacagccacctgaatgattaaattacatttcagtctgtccctacctatattgccagtagtctcctcttttggttgtatcctctttgggaaatgagagttgctgatagtttcatgagagatgagaaggcatcagttttagtctgggagggaccagaactgataaaccccagccccgcagccatattccccaccaaatttcacactttcagtgaagtgctcccgaagggcagacaccgtatttattcttttcttttgtttcactttcttccccagcacctactgttgtagtcggcacattgcaggtactcaaaacaattttgtgaatgaggatgtatgtcttcttcagatgggatcattcccttgacccctttgcaggacttgcaaagatgttcacctgtttactcagcctgcagctctcaacccctcatggaatggggagcacacaggtgagtgggtgcaggagccaagacgagtgcttctgggtgctggcaggagtagaactctctgtggccccatggcagcatctggtacccctgtgacccctggagccccagagggcatgtgttacagtgtgatcttttagctttgccatccatggacaccttaagtgtttaacagctcagtggagggtcagggtaacagctttttgcacctaccctctgggtacctgagttctggtccagcatccaggaagaatcaggttatgtgaacaaattgaagggtggtaaatgtggaggattttactgagcagtggaagtggctctcagcggtatgggagctgtaaaggggatggagtgggaaggtggtcttcccctggagtttggccgtcctcagccgaactcttctctgtctctgaagtcctgccatcaagccctccctctgaagtcaagctgtttctctccgacacctggctgcttcttcttttttctcctctgtggctctgcttctggggcctggggttattatgggtgcaggatgtgaggagaggagagccagggtggttttggaaaaggcaacattcgggtgagaaaacaggaatgcatgctctcactttgggctgcagtttcaggcttaagggtgtgtcacttgctgggaccaccctcttctacccagtatttccctgcctcctgtgtgtatcactctcagtttcacacaccaaaaagtatattcctccatgccagactgctggacactggatccacaccactctctctcctctgaggatgctgctgtctcctccctccctgcagctccaatgtgacatcctcaagagggttctcttaccaccctaacaaaaggaactgcttgcccccaacacacatgcatacatgcacactcttttcctggtttcttttctcaaatcaccttgcactaactgaaagtatcaattaagatcatcaagttcagttagtccatttcatagatgaaacctgggcaggttaatgtgcatttacccacagataacagctagttactgaaagagcagaagcatgattaaaatcttcctgctaggaggatcttctccctcagcaccctgagacccctcattggccctgtgtgtcttcctggaaggtgagctgtgaagcagcccacccctggtcagctgttcctggtggagccaaggcagggtaaggcccacagcttgctccctcccggtcctccatccactctggggagagggcctgggcccagccccctcacactccctcagggatccttttggctgcagcttctcctgcacactagcattttttaatttttggctggtgggggtaggatttctgagttccagtttgaagagggagaatctgacagacctggctaagaactaacctctctgtccatgttaggggcaccaatcaatcaaaatgtgagttggttacccttgagtgaactgtccactccagcctcactcatctgccactgggggtgagggtaagggcggagacaagaagagtcaggggtgcatgattgcccacctgcccttcagcagggactggctttgtcttcctttcttctggtcctttagaaattgcagaggaagaattccagctcagatctgtccactccctcagggtcccagactcacacactttttaccacaccttctccactctcatgcctccacccatccctgcctcctagagatcagggaaagggcctctgagcactggcccaagatctctcaggtagggcctgttttagagaaaaaaggttgtttaaaaacatagccaaacacaaataactcctggcgcagatgattagtattcatttagctctgcctagacttataactcccagggtgtcaaggagcaggacagtttacaagctttggattcaaacccatcattaaggccattattaatgatgagtttggattcaaacccattgttaagtcaagaaagggatgaccagatagtagatattcccattacctttatttcattacatgaatgtataaaattatcacatgtacccccaaaatatgtacatctactatgtatcaataaaaaaagaagtcatgaccaccttagatacccatatatgtcttctgaatctggattgggagcagagacatctgtttctgcacacctggagctgctctcctctctctgacccactaaggaagtgtagcagagcagtagtgataaaagtgaccttattatgcacactaggctgagtgggctctaagttcctttatgtgtatgtctgaaatatatctttgttttgttttgttttgttttgttgagacagggtcttgctctgttgcccaggctggagtacaatggtgcaatcatgggtcactgcagcttcaaccccctgggctcaagggatcctgctgcctcagccacttgagtagttgggactacagtcatatgacactgtgcccagctaatttttttttttttttgtcaatagcttattggtttcattaaaatatttcctcttagaagtaattcaaaacacccatttaaaaaacatattacattcctgttgcgtccacttactattattgaaagaagagtctacatttgattatgcacccagctaattttttaagttttttgtagataccaggtcttgccaggttggctaggctggtctcaaactcctgggctcaagcaatcctcccaccttggcctcccaaagtgctattactacaggtgtgagccaccccatcctgcttgtaatatttcataattttaaaaaattgttgctaatctggatatttaaactatttttactaactactcatttgtgacacagctcacgaacttgataccttgcaacctggttgagaaagatgctacaaagaatttctgtgccccaaggacatacatgatatagcagggttgtatgaaggcatttgagtcctaacactcaaacagtaggtgctggtgaaaaaaagagaataaatacagtgcctgctcttggggagcactctactgaaggtgtgaggtctagtgggaggtgtctcccaccccctaccatatgcaattcaagttaagcaatgctaaaaccataaagtgacaaataacaaaaatttacttgtatgttaaaaatcaagtcgcttcttggatgggctcttctggctttcctagatccatgctttgtcttactggtgggtaaagtctagaccagtgctggtctagactgtaagctccctgagggcaggactggggattacaacaccccatgtgccttacagctcgcctcacgcacagcctgcctctagtgtgtgctgcctccatctctgtggaatatagaggaactaactgtttctgggtgtctggaatggatgcttgaaggacaatgggctgagaagcctcagaagtcatttttttcctcatctatggaagtgctgaaggaaccctaaggaggtgggtcgttacagacctgcttccatctgtaactcctgctcatggacacatttgctgggcacctcatctggggatgaggacaaggttggctcaccactgagcactgacacagttcagtttgaggcaggaccagatttaacatttttatccacccacctgctttcctactatttgcggcttcatatctttatgtcttgaaggctgtgatattgtgatataataagaaatatatatttggtcttcatccgtgtccaaggcacaagagctcctaaaacccttggaattttctgagggataggtgtgagaggagtgtctttgttatttataataagcccctttcaaccatacctcagtttgtgcaagtgaggtgactctttgaggatgggggttggttgcagaaaaaccaaccctgtgattagagggttggaactttcagccctggacaccattcctgcctccaccccacatctctggagaggggcaaggggctgaagatggacttaatcccaatgaccaaagatttaatcaaccatgcctatgtaacggaaccttggttaaaaaaaaaaaaaaaaaaaactaaagaaaggggttcaaagagctccagagttggtgaatgctgggagggtggtgcaacccaactccatgagtacagaagtcctgtgcttggaaccttcttggaccttgccctatatgcctcttcatctgactgctcatctgtttcctttataattaaccagtaacagtaaggaaaagtgtttccctgagttctgtgagccctgatagcaaattatcaaacctgagcagaagtcatgggaacgcatgatttgtagcttagttggtcagaagtactggaggcctgagacttgtgactgttgtgtgaagtggggacaatgttgtgggactgagcccttagcctgtggggtctgtgctaactttgggtagtcagtgtcagaaatgacttaaattgtaagtcagctagttggtgttcacagagaattagtgaacttcttgatggggaaaacttgtgtgtcttgtgtttaaagtgttgagtatagaaaatagttttcttttaaaggtcttcggattacctgagcctcctccttaaggggcagccaccttaagcttttgttaacctactcttcaggtaccaggagcctcagttaggcctagtaggaataaaagtggacataggataatatgacaaataatgtggcttggcttacccaaaccccatttccaattcacttcctacttgccgcctttcccacaggggtggccaggaaacacagttttaactaatgagacatagatggagctctgctgtgaggttcctgggaaatcctttgcttttctcattcaagcatcaccctgattcttttataattgagtccaaagctcatactactcaccacacaacagccaataagtagagatacaaggtgttggggcaaggaaagcaacttttattgggaaagccaacaaactgagaagatggtggactcgtgtcctaaagaactgtcttaagttaatacaaattttagactctttttatgttaggggaagggagaagaggaagggaattgaggtcaagagatgactgatgatcacagacatctgggtggcagtgagggtccaaggaggttgtgaaacttctgtgttcttggtcaagtcacagtgctcctctaaatctttaacatggacagggatggtggctcatgcctgtaatcccagcacttgacggaggttgaggcaggaggatcttttaagcccagggattcaagaccagccagggtaacaaagtgagacctagtatctacaaaaataaaaataagaacaaaaaatttgtcaggcaaggtgatgcatgcctgtagttccagctacttggaaggctgaggtaggaggataacttgagcccaggaggtcaaggctgtagtgagccgtgagtttgccactgcactccagcctgggagacagagtgagaaagaccctgtctcaatctttaacatacttgtgcatacaccctccgtatctccttgaaggttagctggggaagggactattatccttgctttaaaggtaaactataagctaaattcttcccacagttagcttggcctatgtgcagataagcaaagcagttagcccaaaagatatcactccgcctgggggatggggaaatagcagcaaactggagttagtcatgctaggcttccttttcatgggtacactttccctgtttttcctgctgtgattaaaaatttgacatttactgcttcagcagccatcctaaaatcacgaggaaatgatcaaaagaaccccagaggtttcagtcctaactgcacagagccactggatcagcagcagcagtaatcgcccacctcgacttcctgttaagttagaaaaataaatcttgatttgtttagatctttatagtatgctttgcattatttgcagccaaaagcactattatgaatacatatagacccctgggatacaggaggggagcactcccacagccatgcttacctatagggacctgggttcggatctgctggataaagcgcaggttcctgagtgactcagatcccaactgctagacatggtttctaactggagactaggactctaagtcaggaaacagggcaggatggtgagtgtgctgaatttcctggacgactgtcactgtggggtttagggaataggtgggcagagtgcccatggtcctatcaccagactacattgcaatccagctgtgctggtgtattagtccgttctcacactgctatgaagaactacctgagactgggtaatttatgaagaaaagagacttaattgattcaaaattcctcggacctaacaggaagcatgactgcgaagcctcaggaaacttacagtcatggcaaaaggcaaagaggaagcaagtacgtcttagcatggcagagcaggaaagagagagaggagggtagtgccacacacttttaaaccatcagatctcatgagaacacactcactatcatgagaacagcaagggggaaatccgcccccatgatccaatcatctcccaccaggcccctcccctgacatatggggattacaattcaacatcagatttgaatggggacacagagccaaaccatttcagctggcctcataaggagtgaaaccaagaaaacactgcgggaccccctggaagctgggcatagagagggtcacgctctacccagctgggtcactcaggagactagggactcagatagctctttttcttctgagttgggtcttctgtctctgcccagcagtggcaatcagccttgtcaagtcctccgtggagaatgatgatggcttgaggtgaacaaacactacagtgttgtagaaatggaggagacagagctgccgttggcatgggtccttgtcatcccctcccctgcttcccctcctagtatcatcccctctcctgctacaccgtgtgaccacccacccctcgggcaattcctccagcctccgtgtgaggcaaggagttgaaggtggaagctggatgagctgggggtgtgagaggtggagcgtaaggtgggcagggactgtgtctcatccagcttggtgtcatcagcacctggaacagagtgggtggcaaaagatgtgtggcttatgaagcaacatcgggacgctcatggtccagtttctgagcagtgcgctgtttaacaaccaatgtgtcatttcaaaaagactcaagttcgttactgtcttttcttgaactccttggagggagatatgtagaccacagcaacattcctaaaacatcttgaaagtgctgcctgccgctgtgtctctgcttcctccctgcagctcataggtcccagcgtggatcacacatgtccatccagcaggtccttcccctcctgccttctggaaagctgtcctggaccatggccctctgcctgctccccctacctcacgtccatgctgcacacctcctctctgtacccagtgctcctgttagaacccactgtgtgtgttctgctggtttctttgattgtctctccccacccaccctggccaccactaagttgtcagttccacgtggatagggacaagccttttatagcctagcattgtgccttggtacatagtaaatgctccaaaaaaaaagtttgtcaaatagaaggtatgctccttgctttaggacttgctttttattgaaagagataagctgtaaagacatccttacaaataaaatgtgtaatgtgtcggaaggggagtgaaccttacagaggggccctgaggagtgtgaggaggaatcccagcacaggagctggacttgttctagaagtgacatcccggtttctccgtggagccgcaggatgcacattccctgtgacagacagggccagcagctgcccaatgcgccatcacaactttaatgtaaatgtagctgtgtttgtatgaacgaatacacaattcagtggtgtcacatgatgctgagagggaaaatggcctgatgggacagcctgtctgcagctccataccaacacatgccctcgtgccatcttctcctcagtggaggtccaaggcctgttcttattaaaaaaaataaaggctgtatgcggccgggcgcagtggctcacgcctataataccagcactttgggaggccgaggcgggcggatcacaaggtcaggagatcgagaccatcctgtctaacacggtgaaaccctgtctctactaaacctacaaaaaaattagccaggcatggtggcgggcgcctgtagtgccagctactcgggaggctgaggcaggagaatggcgtgaacccaggaggcggagcttgctgtgagctgagatcgtgccactgcactccagcctgggcgacagagcaagactccatctcaaaataaataaataaataaacaaataaaggctgtatgcaagctaaggagtggccttcatgtcccagatctgcctggctttgccctttttagctgtgtgattttttttttctttttttttttttttagactgagtcttgctctgtcaccaggctggagttcagtggcttgatgttggctcactgcaccctccacctcccgggttcaagtgattctcctgcctcaatctcctgagtagctgggactacaggggtacgccatcatacccagctaatttttgtatttttagtaaagacagggtttcaccatgttggccagggtggtcttgatctcctgaactcgtgatctgcccgcctcagcctcccaaagtattgagattacaggcatgagccaccgtgcccggcctagctgtgtgatcttaattctctatgccttgggtcccttatctctgaagcggggatggtaatagcattgaccttatggggttattgcaaacattaaatgaatgaatatgggtaaaacaggtcagcgcctggcccatctgaagacctggaaagtaccaggtgttagctgtgattgtactctgtgcacaagccctctgtggtttggagcatttgttatcctctctgagccacagccactgctgtacatgtgtaaacactctctacagaatttggaaaatgcagcctgggtggcttcctgggaaacatagattaggactggatgccccagggaggtaaggttgacaggtgtagcaaagaaaactacagggagcccagttacattttaatttcagataaatagcagatactttctttggtatagatatttcccattcagtacagtatttgggatataaacttgaaaaatttatcactgaaattcaaatttaaccaggtgttctatatttactctggcaaccctgctgggagggtttcttcaaggcattgccttctgatctggtagcctacagcctgccaaagtgaaggggaagacaggagccagggattaaaaccaatgacccatcctggagcctctaaatcatgcctttaagtctcgctaccctcagtggcccattggcccatcctggagcctctaagtcatgccttctgtgacttcagactttgccagggctcttcaaggtgtctgtgcagcattgcatggctccagcaggcactgagaagaaatcgtattgacttgactgattgaatgaatgaaggaatgaatggggttatagtgggtctgaagcctgcggagtgtgattggagggacatcaagaggctccattcctcaacatttgttagccacgcttccccgaggtctgcagactttaccatgagagagccattcctcagagctaaggaatttgtccactggagcctccattaaagtggagtaggcctgggaggggccatactcagtgccagcagcccttcccacattggcaggctctgtgagttacacagggtgtgtgtaggtggggacactcagggctctgcagtcaggatgcctggatttgaatcccagctccattcactgaaacaggcattgattctccctatattttctccatctcccatttcagtctggcagccttggaagttgctcaaaggcagctgttctccatgccttggtgcagaactaaacacattgaagagcttatgccaaatgccattgagggtaatgagaaagagagagatagacggaaagagtgatgtttccccataatgggttgagagagagtgaggatctgggaactatctggtgaaagcaaattggggagaagcaagagcttagaggagacttctggctactttctgaaggttccaggccctaggagttgtgtgggcctggaaggacatcgtgggcaggataacgggtgtctcaatagcagacagtatagacagatcaacagcaacggtaattgagtgctttgtgcctggcactgtggtaaacgccttacaggtattcatccatgcttagagtagccgcttctgtttccccgtgagaagttgaggggcggagagtttaacttcagaaccaccaggaggtcttctttgaagcctgggcttgcattagatctggggtgagagattttatggtgactgagggtaaatttctctcaagctggaggggatgaagactcatacttgtatttgagtcaatttaaagaaaaaaaaaaagaaatgtgatatttggtttgtcactgaaatctggactccttgtacaccttcattatggagatttgttcgttggactccaatgtgctccagcctgacccgctcaggcccctccgaggcaggaggatgcgcaggcatcggactgctccttagggagtggcggggaggggttctgctcgatttacctcttggcagccatcagagcctccctgggggaggagggagctgggagagagtggcaggggcttcacgtgcgagcgctaagtccgagccctgtgccccaagctgcccggtgcctgcacagcctccccggctcctcataaaggctctgagtctagcacagtatctccaaaggccactaggggcagtgtcagcctgcgcttcccagggctagcccagtcgtcggcctccggagaatccccaagaggttcccaaacaggcagattctggtaccagtgctggaggttcagtgggtctggggcagagccctaggaatctgtattttcacaagcacctccagtcgattgtgatgggcagtcaggtttgggaaccactgatcctggcttaccttctacccatttccggcatcctccgtcgcctcctcaggcccagcccctgaccacagctcatccagcctcagttggaactctccttgttgtcgattgttcagaatgcctgacagttctttcttccactgagccaaaggctcgcctcccgctgctgtcctctgacccacatcctcccgcagtgctgtgctgtgcctgccttcgccagcatctctcccctgccgggcccagcacggatcacctctccctacctgctgccctcggtgcggctttcctcctggcggcacaaggctcccggacggcccaccctgtgcttgttcgctggacgtgtctgttgacgcctctgtaaatacacagccacgctggagccttaacctccaagacgtctgatggggagaagaggcacagagccccctttctccctgggaagctgctgcctttcgtgggggacctatgtaggtctaagagctaatcatactaaagggaaagttaagcacagaatagtcctctccccactgtcacactagcccaattccacaactgttgttacttttctttaaaaaaattgacctggcatggtggcttatgcctgtaaacccagcactttgggaggccaaggtgggtggatcacctgaggccaggagttggagaccagcctgactaacacagggagtctcatctctattctactaaaaatacaaaaattagctgggtgtggtggtgtgtgcctgtaatcccagccacttgggaggctgagccacgagaatcacttgaacccaggagacagaggttgtagtgagccgagatggtacccctgcactccagcctgggagatagagttagactctgtctcgaaaaaaaaaacaatttaccttaacatatttattcagttgctactagggtatgtataccgtttcatattctgccattttcataaaatactatttccccacatctctgcatagtcttcctaattccattataatggctgcatagtaccacatcctgtggcctgggttcaagtctctgtcttccaccagcatgctgcaggcaccctaacatgccattgttcctctccatgagctgatcctgtccccatgggcctggcatgcttgtccatcattttgttttatcttctagcccttgcactagatataaccatacagtatccctgtcatttggggcatagataggctaacacttgctttatggcactgtccatagggggctgcaaaacagaagagctattttagctgttatctgttagaccgctctttgctaatcaccactaccatttatggagctatcatgggccagtcttagattgggcatttggtgcgacttatcccaggcaattctgaaagcaactctatgagatatccatacaccagtccacattacagatgagaaaactcaggctcagaaaagttaagcaagttatccaagattacacagcatttacaggacagagagggattcaggctcaggtctggggcactgctaagtttctgcttatgtcgctctcttacatttcaagaaatgtaatccgtctcacgtgtatttgagcccctgcaaaataagccttaatgtaatggagttgtagcaaaccttactgattttgtatttctccaacccaggcctagtgataggctttttctctcttatgttggttgaaaaacatgccctctcaacccactgtgcagactgagcaattgatgcataggcacaggaggccactaggccagagaaaggtgggggattagaactcaggtcacatagtgtcagagagcagatggaaggccaagaggagaaaggggtcatcggggagatgcctgtggtaggcaggtctgtctgcagttcagctcctgtgaggtcctggcaccagggtcaaaccatctcccatctgtaccttctcattctacctttcaggaatagcttttgcccaggctctgcagcccaacattgccctcgctgtgggcccagctcacatagccctcctgcctggcctctcctgacctttcctgccccacagcaatcatgcactcctctgaactcctctgcaattacaatttaaataattcatttggcaattaatcatatcttgccttgtgacatctcttctgttccacgttgagctgttatttagaagtgcaattgtttaacttcccatgagcagcatatgctgccttgctaatctagtccagttttttgttgtttctttcctggcagtcaatcaaaccaggggtaacaatttgaggccccattggtggggggtaggcagtgggcagagatccccattcaggaggccatggagcaggcagccaagagccctctgacaacagcctcttagagagcaagactgccatcacactcctcagcctccttttctcctgattcccccagttatgaaacagctctggatacaaacaatctcaggaattttccatgcatttgtacagtctccttgactggattagatttcctgtgggcaaggaccattcattctattttcagtgaggctgcctaacatgatgtggcaaatcctgaaatgagggagagaagcctgagaattgagtcccagctctgccacttactacccatcagcccaagtaagtcattttacttctctcagcctcagttttctcatttctaaaaagggggaaaatacccatctcatgaaagtgttaagagaatcatggaacaagtgcttatattcacactgtatatgtactctaagcagcttgcacacatcaactcctttaatactcatattcactcaaagtagattctattattatttccattatacacaaaaagattaacaagtgaggagcaaaataagtgggggtgtgttctttaggggatacaaggaaggcctgccaagaacaatggcgagggacgagtttcacgcctgttgggtgtctgggtgtcagtggggggagatgggtggaaggagaggtagatggaagcaggcactgggcagggtgtggcccttgaatgttcccaggagtttccaggctttaggcctgagatacagaggggagaatgggagttgggatggttccaggcttcagtgaattccaagatcaatgtatttgcttgaggtgaacttgacctgggaggagaggagtaaccccaaggcagtcacagatgtctctggagagtgaaaatgagaaaaacgtgtccagagggttttatccatccccatccctcctaaaggtgagggctagaagttattttactgtaactcaagcctggggaggaatcataagtcttttagcaccatgagtgtgggagctgcactaacaagaagtcttcttttccctgtaaaagatcccattgtttgtagatggtctcagggaacatagcccagctggagggcctcttccccggccctgacactagtccggccctgacagtagtcctcctctcaggatcggtagtgcctccttctcccctcccaaatgcagcaacctagctagaaaaacagacagggactgatacagcacaccaggtgctggccaggagcagatgggatctcaggagaggaagacaacgggttaaatggaagaggggagggagagggtctgggggaggctgtccattgaccaaggacatggccaagtgtaggctcaagaattctggacctctagcggggtgcaatggcacctacctgcaatcccagctacttgggattgcttcagtccactagtctgagaccagcccgggtgagaccctgtctcgggaaaaaaaaaaaaattgtggaccaaaaagggcttggaaacaattggatagactaggaaagctgtttctgacccctgcatctttggggttcagcatggtagccactaaccacaggcggctttaagtacctgaaatgggacttttcctgagatgtgctgtaagtgtaaaatgcacaccagatttcaaaaacctggtatgagccaacagaatgtaaaatatctcattattaatttttaaatattgattacatattgaagtcatatttaggataatactgggttaggtaaacattattattaaaaatcctttttacccgttttttgaagtgtttttcctgcttactagaaactaaaactacgaacatggctcgcattatatttttattgggcagggctgctcagcccttttggtgcccagatggttacaggctgaggggaaagcattctgttgtagactctaccccatcccccagccttctgagtggggtcacaggaatcccaggacccctagaacatggccttgacctacagggggagaacagtgggagagaaacagggaataagtgagggaaatgaggccaaaaaggatgattctggttcttgagtctacctggttggttagtggcagaatctaaagcactattgtagaaactatggggctaaagggatgagggaaatacagccgctcgtcttctgggggctcacagtcaagtgaaagtgggtgaaactgaggcatcttaaatgagcatctgtaggaagtgatcaaaaagcactgccatacagcctgggggtcctcattgatgaagaagcctctcaacctgaaggcagcgtctggagagagccaggatgctggaatcagagggaaagaagagaagagggactcaacatttgttcagagccccttttattcatttaagcctcagaagataatcatgtttggtgctactgcccccaattgtggatgaggaaaactgaggcttagacagccaaagtaccttgttcagggtcaagagccactacctcccagaagatgagctgtttgaggggctctgctacttgctaactgtgtggctttaggaaacgtgcaggacttctctgagcctgtctccacttctcaacaggctattatgaagactagatgagatgataattgggaaatgcttcataaatgggaactgtaatgccttcgtatccagctcacaggagatgctcaacatgctgactattcccaaatgtagatctctagcctgcacattttcacttggatgtttaacaggcatcttcttaaactcaatgcacccagaattaaactcctgatattcccctccaaat

SEQ ID NO: 28211 - DNA, 2928 bp, Homo Sapiens
atggaggagaggaagcatgagaccatgaacccagctcatgtcctctttgaccggtttgtccaggccaccacctgcaagggaaccctcaaggctttccaggagctctgtgaccacctggaactaaagccaaaggactaccgctccttctatcacaagctcaagtccaagcttaactactggaaagccaaagccctctgggcaaaattggacaaacggggcagtcacaaagactacaaaaagggaaaagcgtgcactaacaccaagtgtctcatcattggggctggcccctgtggtctccgtacagccatcgacttatccttactgggggccaaggtggttgttattgagaaacgagatgccttctcccgcaacaacgtcttgcatctctggccattcaccatacatgatctacgaggtctgggtgccaagaagttctatggcaagttctgtgctggagccatcgaccatatcagtatccgtcagctccaactaatacttttgaaagtagccttgatcctaggcattgaaatccacgtcaatgtggaattccaaggacttatacagcctcctgaggaccaagagaatgaacggataggctggcgggcactggtgcaccccaagactcatcctgtgtcagagtatgaatttgaagtgatcatcggtggggatggtcggaggaacaccttggaagggtttcgtcggaaagaattccgtggcaaactggccatcgccatcacggcaaattttatcaaccgaaatacaacagcagaagctaaagtggaagagatcagtggtgtggcttttatattcaaccaaaaatttttccaggaactgagggaagccacaggtattgacttggagaacatcgtttactacaaagatgacacacactatttcgttatgacagccaaaaagcagagtttgctggacaaaggagtgatactacatgactacgccgacacagagctcctgctttcccgagaaaacgtggaccaggaggctctgctcagctatgccagggaggcggcagacttctctacccagcagcagctgccgtctctggattttgccatcaatcactatgggcagcccgatgtggccatgtttgacttcacttgtatgtatgcctccgagaacgccgccttggtgcgggagcagaacggacaccagttactagtggctctggtcggggacagcctcctagagcctttctggccaatgggaacaggaatagcccggggctttctagctgctatggactctgcctggatggtccgaagttggtctctaggaacgagccctttggaagtgctggcagagagggaaagtatttacaggttgctgcctcagaccacccctgagaatgtgagtaagaacttcagccagtacagtatcgaccctgtcactcggtatcccaatatcaacgtcaacttcctccggccaagccaggtgcgccatttatatgatactggcgaaacaaaagatattcacctggaaatggagagcctggtgaattcccgaaccacccccaaattgactcgcaatgagtctgtagctcgttcaagcaaactgctgggttggtgccagaggcagacagatggctatgcaggggtaaacgtgacagatctcaccatgtcctggaaaagtggcttggccctttgtgcaattatccatagataccgccctgacctgatagattttgattctttggatgagcaaaatgtggagaagaataaccaactggcctttgacattgctgagaaggaattgggcatttctcccatcatgacaggcaaagaaatggcctccgtgggggagcctgataagctgtccatggtgatgtacctgactcagttctacgagatgtttaaggactccctcccctctagcgacaccttggacctaaatgccgaggagaaagcagtcctgatagccagcaccagatcccctatctccttcctaagcaaacttggccagaccatctctcggaagcgttctcccaaggataaaaaggaaaaggacttggatggtgctgggaagaggagaaagaccagtcaatcagaggaggaggaagctcctcggggccacagaggagaaagaccgaccctggtgagcactctgacagacaggaggatggacgttgccgttgggaaccagaacaaagtgaagtacatggcgacccagctgctggccaaatttgaagagaatgcgcccgcacagtccatcggcatacggagacagctgacacaagagcgtggggccagccagccgtcctgctgcctgcctgggcaggttcgccctgcccccaccccccggtggaaacagggctccatgaagaaggagttcccgcagaacctgggaggcagcgacacatgctacttctgccagaagcgggtctacgtgatggagaggctgagtgccgagggcaagttcttccaccggagctgcttcaagtgcgagtactgcgccaccaccctgcgcctctcggcctacgcctacgacatcgaggatggtaaattctactgtaagccacactactgctatcgactctctggctacgcacaaaggaagagaccggcagtggctcccctgtctggaaaggaggccaaaggacccctgcaggatggcgccaccacagatgcaaacggacgggccaacgccgtggccagctccactgagagaaccccaggttcaggcgtgaacggcctggaggagcccagcatcgccaagcgactgaggggcaccccagagcggatcgagctggagaactaccgcctgtccctgaggcaggctgaggcactgcaggaggtaccggaggagactcaggccgagcacaacctgagcagcgtgctggacacgggcgccgaggaggacgtcgccagcaggtcagcacgcagggctgcagggcgcccacccgccacacggccc

SEQ ID NO: 28212 - DNA, 5411 bp, Homo Sapiens
ggccaagccggggccccgaagccagagccggagccgggcgggccgcggggtcatggctgggccgcggggcgcgctgctggcctggtgccgccgccagtgcgagggctaccgcggcgtggagatccgcgacctgagcagctccttccgggacggcctggccttctgcgccatcctgcaccggcaccggcccgacctgctagattttgattcgctttccaaggacaatgtcttcgagaataaccgtttggcctttgaagtggctgagaaggagctggggatccccgctctcctggaccccaatgacatggtctccatgagcgtccctgactgcctcagcatcatgacctatgtgtcccagtattacaaccacttctgcagtcctggccaagctggtgtctcgccacccagaaagggccttgcaccctgttccccgccgtctgtagcacccactccagtggaaccagaagatgtggctcagggcgaggagctctcctcaggcagcctgtcagagcagggcaccggccagacccccagcagcacgtgcgcagcctgccagcagcatgtgcacttggtgcagcgctacctggctgacggcaggctgtaccatcgccactgcttccggtgtcggcggtgctccagcaccctgctccctggggcttatgagaatgggcctgaggagggcacctttgtgtgtgcagaacactgtgccaggctgggcccggggacacggtcggggaccaggcctgggcccttctcacagccaaagcagcagcaccagcagcaactcgcagaagatgccaaggatgttccaggaggcggccccagctccagtgctcctgcaggggctgaggccgatggacccaaggccagccctgaggcccggccgcagatccctaccaagccccgggttcctggcaaactacaggagctggccagcccccctgcgggccgccccacccctgcccccaggaaggcctctgagagcaccaccccagcaccccccacgccccggccccgctccagtctgcagcaggagaacctggtggagcaggctggcagcagcagcctggtgaacgggagactgcacgaactgcctgtccccaagccgagggggacaccgaagccgtccgaggggacaccagcccccaggaaggaccccccatggatcacgctggtgcaggcagaaccaaagaagaagccagccccacttcccccaagcagcagcccggggccaccaagccaggacagcaggcaggtggagaatggaggcaccgaggaggtggcccagccgagcccaacggccagcctggagtccaaaccctataacccctttgaggaggaggaggaggacaaggaggaagaggctccagctgcacccagcctggccaccagccctgccctgggccacccggagtccacacccaagtccctgcacccctggtacggcatcacccctaccagcagccccaagacaaagaagcgccctgccccgcgcgcacccagcgcgtccccactggctctccacgcctcccgcctctcgcactcggagccgccctcggccacaccatcgccagcgctcagcgtggagagcctgtcgtctgagagcgccagccagactgcaggtgcagagcttctggagccgccagctgtgcccaagagctcctcagagcctgctgtccatgcccctggtacccctggaaaccctgtcagcctctctaccaactcctccctggcctcctctggggaactagtggagcctagagtggaacaaatgcctcaagccagccctggccttgcccccaggaccaggggcagctcaggtccccagccagccaagccctgcagtggcgccaccccaacgcctctcttgttggttggagacaggagcccggtgccttcccctggaagctcgtccccacagctgcaggtaaagtcctcctgcaaggagaatccttttaaccggaagccatcacctgcagcgtccccagccacaaagaaggccaccaagggatccaagccagtgaggccacctgcccctggacacggctttccactcatcaaacgcaaggtccaggctgaccagtacatccctgaggaggacatccatggagagatggataccattgagcgccggctggatgccctggagcaccgtggggtgctgctggaggagaagctgcgtggcggcctgaatgagggccgtgaggatgacatgctggtggactggttcaagctcatccacgagaagcacctactggtgcggcgagagtccgagctcatctatgtcttcaagcagcagaacctggagcagcgccaggctgatgtcgagtatgagctccggtgcctcctcaataagccagaaaaggactggacggaggaggaccgggcccgggagaaggtgctgatgcaggagcttgtgaccctcattgagcagcgcaacgctatcatcaactgcctggatgaggaccggcagagggaggaagaggaagacaagatgttggaagccatgatcaagaagaaagagttccagagggaggctgaacctgagggcaagaagaaggggaagttcaagaccatgaagatgttgaaactgctaggaaacaaacgtgatgccaagagcaagtcccccagagacaagagctaacagcacgagaagccagttggggactgccccctcctggagcagctcctgggctgtgctctgtttgaagggggcgccctgctcccctcagatcagtcaggaggaagatgactaaggggagggatcctctgggtgatggcctcttcctcctcagggacctctgactgctctgggccaaagaatctcttgtttcttctccgagccccaggcagcggtgattcagccctgcccaacctgattctgatgactgcggatgctgtgacggacccaaggggcaaatagggtcccagggtccagggaggggcgcctgctgagcacttccgcccctcaccctgcccagcccctgccatgagctctgggctgggtctccgcctccagggttctgctcttccaggcaggccagcaagtggcgctgggccacactggcttcttcctgccccatccctggctctgagtctctgtcttcctgtcctgtgcaggcgcccttggatctcagtttccctcactcaggaactctgtttctgaagtcttcagttaagtttgagtttatgactgagtggcctgtactgtcagacgtgaatgggcctgacgggcaaatccatccctctctccctcacagttccaggagcggcttccctcgtctccccttactccacagggagcctcccttgccaggaccagggctgcgacggccatgctggggcaggtgagtgctctgttagctgctcccagtgctgtccccaggctgcagttctggtccctggttgtcaggtaggaagggtgcacttgaagcaggtgctcatctcggttccttaacgtttatagtctgacccctcacttaggctttcctctgccaccccggtccagggaagaggctcgctcccgcccatggtcatcactggtctgtctgctctgttgtctgttctttccctgactccctcccaccgaaggcctgatggctactcacccctctgggatggctatgggagaggaggagtgatggggaccgccaccttttctgcaggaaatgtgcccagcagctcttggtcaaagcactgttgctataagctatctctgggatgcctctaggcccccttccctctacacacctctgggaaaagattacactgtattaactctcgaggagtttcctcaccaataaacagacaacctcaactgccagtgccctgcagcctcgggccacagcggcagccttgtttgccttcccacctgcctctgccacacctggtggctgaacatctctggtcgcccagaggccatgttggggccatcctccaagagggatctctgccctcaccgcctgccactgggcaggatccctttcctctgcagggagaggtggctcctcggccatgcagcccctggcaggctccttctaaacatgcctgttgacctggagctggcgccaccaactccagggcctttccagggccagacaggtaacacgcatgaacccgagtgacagctctgacgggctgtttcggtgtcaggagacaaagctggcaggggcaggggtgaactggaggcaagtcaagtcacctgtggcctgtggggctgaatgtgggcccggtgttgccagatcctttgtcataagaagctagaaatccagattttatgtgtgtgtaatttgtaaatgctgaaagctagcctgaattttttttttttttttttgagacagagtctcgctctgtcgcccaggctggagtgcagtggcgcgatctcagctcactgcaagctccgcctcctgggttcacgccatcctcctgcctcggcctcctgagcagctgggactacaggcgcatgctacgacgcctggctaattttttgtatttttagtagagacggggtttcaccgtgttaaccaggatggtctcgatctcctgaccttgtgatccacccaccttggcctcccaaagtgctgggattacaggcgtgagccaccacgcccggccactagcctgaatttcaatcaagggttggctgatactgtgtgtccagggtggactggatttgtcctggggggttctctggtttgctgcctcctgaccacatgatggggccttcgaggtcgaggacaactgttcccattagattgcaccctctgccctcaggttcttgagggtgtgtggacacagaggctttccatgggatgtccctgagccggcccttgattggggcctcaccatttacagggccgttttattctgcaaaccgaaacttgggtcatgtgacctgatgggattatgggactccctccaggtgcccgagacaaggttgatatttccaaaatattttggtgatttagtgggacaagcaaatgacagaataccggagaaggcagggatcgtgggtgtcaggagccagaggggagggggacagatgtgctgtgtacaggacaaggtgtcaggtgactccttcccagcagggcctcgcagatgcacaagcacggagctggtgggttttgcccaagaaaggtcacgcggcacatgcagggattggaactcccaggccagggctctaggtcgctcccaccttttcatgtttctttctgtggccatgggtatagtggaaagacataaagctaaagccaacttttaatcctgaatgcactgcttgccaggtaaatgcccttggttgtggtatcttgttgagacttagttttcacagagggataatgaaccgttgcagaggtttattgagatcattaacagagtggaattcagcacccgccacagcagccagccatggg

SEQ ID NO: 28213 - DNA, 2418 bp, Homo Sapiens
cgacagcgacttctcctgacccctctgccaccctcccatccgtccgcgggtccgtggagctggagcagatcccccagccggctgagacaggttgtcttttggaaatgcaggtttaaggacaaattatctgcttaagctagaagatgggatcgaatagcagcagaatcggcgatcttcctaaaaatgagtacttgaaaaagttatcaggcacggaatctatctctgagaatgacccgttctggaatcagcttctctcattttctttccctgcaccaactagcagtagtgagttgaaactcttggaggaagcaaccatttcagtctgcaggtcattagttgaaaacaatcctcgaacaggaaatcttggtgcactaattaaggtcttcctttctagaaccaaagaactaaaactttcagcagaatgtcagaaccacatcttcatttggcagacacacaatgctttgtttattatttgctgtttgctgaaagtgttcatctgtcagatgtcagaggaggaattacaacttcattttacttatgaagaaaaatctcctggcaattacagttctgactcagaagatcttttggaagaattgctgtgctgtttgatgcagttgatcactgatattccactcttagatattacatatgaaatatcagtagaagctatatcaacaatggttgttttcctttcctgccaactcttccacaaagaagttttgcgacagagcatcagccacaagtatttgatgcgaggtccatgtcttccatacaccagcaaacttgtgaagaccttattatataactttatcagacaagaaaagccacctcctccaggggcccatgttttccctcagcagtcggatgggggaggactgctttatggacttgcatcaggagtagcaacaggactctggactgtcttcacactaggtggtgtgggcagcaaagcggctgcctctccagagctttcttcccctctggccaaccagagtctcctgcttctgctggtgttggccaatctgacagatgcctcagatgcgccaaacccctacagacaagccattatgtccttcaagaacacacaagatagcagtcctttcccctcatcaattccacatgccttccagatcaactttaatagtttgtacacagctctttgtgaacagcagacatctgatcaagcaactctcctcttgtataccttgctccatcaaaatagtaatattagaacatacatgttggctcgcacagatatggaaaatcttgttttaccaattcttgagattctgtatcatgttgaagaaaggaattcacaccatgtgtatatggcccttataatattgttgatccttacggaagatgatggcttcaacagatccattcatgaagtgatactaaaaaatattacttggtattcagaacgagttttaactgaaatctccttggggagtctcctgatcctggtggtaataagaaccattcaatacaacatgactaggacacgagacaagtaccttcacacaaattgtttggcagctttagcaaatatgtcggcacagtttcgttctctccatcagtatgctgcccagaggatcatcagtttattttctttgctgtctaaaaaacacaacaaagttctggaacaagccacacagtccttgagaggttcgctgagttctaatgatgttcctctaccagattatgcacaagacctaaatgtcattgaagaagtgattcgaatgatgttagagatcatcaactcctgcctgacaaattcccttcaccacaacccaaacttggtatacgccctgctttacaaacgcgatctctttgaacaatttcgaactcatccttcatttcaggatataatgcaaaatattgatctggtgatctccttctttagctcaaggttgctgcaagctggagctgagctgtcagtggaacgggtcctggaaatcattaagcaaggcgtcgttgcgctgcccaaagacagactgaagaaatttccagaattgaaattcaaatatgtggaagaggagcagcccgaggagttttttatcccctatgtctggtctcttgtctacaactcagcagtcggcctgtactggaatccacaggacatccagctgttcaccatggattccgactgagggcaggatgctctcccacccggacccctccagccaagcagcccttcaagttcttttatttctgggtaacagaagtagacagacaggttacttggtgtatcttctgttaaagaggattgcacgagtgtgttttcctcacacactttgatttggagaattggtgctagttggcaatagataactcagcgtagatagtattgcaaaaaggggaggaaatacacaacaataataaatgtaaaaacctgctaaaaaaaaaaaaaaaaaa

SEQ ID NO: 28214 - DNA, 4770 bp, Homo Sapiens
ccgggagtcgtatcccgagcatggaggttactgagaccgttatttcttcatggcctgcctagcttaagcagtagctggaaaagatgtctcgggctgttcgtcttccagtcccctgtcctgttcaacttggtaccttaagaaatgactccctggaagctcagcttcatgagtatgtcaaacaagggaactatgtgaaagtgaagaaaattcttaagaaaggaatttatgttgatgcagttaactccttgggccaaacagcactttttgttgcggcgttattgggccttaggaaattcgttgatgttctggtggattatggatcagatccaaatcaccgctgctttgatgggagcacccctgtccatgcagcagcattttcgggcaatcagtggatccttagcaaactgctggatgcaggaggtgacctgcgactccacgatgagaggggtcaaaacccgaagacttgggctttgacagcaggaaaggagcgtagcacccagatagtggagttcatgcagcgctgtgcctcacacatgcaggccatcatccagggcttctcttacgacctcctgaagaagatagactccccgcagcggcttgtctacagcccgtcctggtgtgggggcctcgtgcagggaaaccctaatggctctcctaaccgactgcttaaagctggagtcatttctgctcaaaatatctacagctttggttttgggaagttttatcttactggggcgacacagatggcctatctaggatctcttccggtcattggagaaaaggaagtgattcaagctgatgatgagcccaccttctctttcttcagcggcccctacatggtcatgaccaacctagtgtggaatgggagcagggtcacagtgaaagagctgaatctccccacccacccacactgcagcaggctgcggctggccgacttgttaattgccgagcaggaacacagcagcaagctgcggcacccctacttgctacagttgatggctgtgtgtctctcccaggacctagagaaaacccgccttgtgtacgagcgcatcactatcggcacattgttcagtgtccttcatgaacgacggtcccagttcccagtgctgcacatggaggtgattgtgcacctgctgctccagatatctgatgccctgagatacctgcatttccaggggtttatccaccgctccctcagctcctatgctgtccatatcatctccccaggtgaagcgaggctgaccaacctggagtacatgttggaaagcgaggacagaggtgtacagagggacctgactcgagtgccccttcctacgcagctatacaactgggccgcaccagaagtgatcttacagaaggcagccacagtgaaatcagacatctacagcttttctatgatcatgcaggagattttaacagatgacataccctggaagggcttagatggctcagttgttaaaaaagccgtagtctcggggaattatttagaagctgatgtcaggcttccgaaaccttactatgatattgttaagtcaggcatccacgtcaagcagaaagaccgaactatgaaccttcaagatatccggtatattctgaagaatgacttaaaggattttactggagcccagagaactcaaccaaccgagagccccagagtgcagagatacggactccatcccgatgtcaatgtctatctaggactgacttcagaacaccccagagagacacctgacatggaaatcatagaactaaaggaaatgggcagtcaacctcattcaccaagggttcactctttattcactgaggggacactagatcctcaggccccagatccatgtctgatggccagggagactcagaatcaagatgctccttgccctgctccatttatggcagaagaggccagcagccccagcacaggtcagccaagcctctgcagtttcgaaatcaacgagatctactcaggctgcttgattttggaagatgacatagaagagcctccaggagctgcttcatctttggaggcagacggacctaaccaggtagatgaactgaaatccatggaagaagagctggataagatggagagagaggcgtgttgttttggcagtgaggatgagagctcttcaaaagctgagacagagtactcttttgatgactgggactggcaaaacggttcactcagttcactcagccttcctgagtcaaccagagaagccaagagcaatttgaacaacatgtccacgactgaggagtatctcatcagtaagtgtgtgctggatctaaagattatgcagacaataatgcacgagaatgatgataggctgaggaatatcgagcagatattagatgaagtcgagatgaaacagaaggaacaggaagagcgcatgtctttatgggccacttcaagagagtttacaaatgcctacaagttacctctggccgtgggccctccatctttaaactatattcctcctgtcctacagctttcagggggtcagaagccagacaccagtggcaactacccaaccctaccaagatttccaagaatgctgccgactctttgtgaccctggaaaacagaacacagatgaacaatttcagtgcactcaaggagccaaggacagtttggaaacaagcaggatccaaaataccagtagccagggaagacctagagagtccactgcccaagccaaagccacacagtttaatagtgcactcttcactctgtcaagccaccggcagggaccttctgcatcacccagctgtcactgggactctaccaggatgagtgtggaacctgtttcttctgaaatctataatgcagagtccagaaataaagatgatggaaaggtacacttaaaatggaaaatggaggtgaaagaaatggcaaagaaagcagctactggacagctcacagtacctccttggcatcctcagagtagtctgactttagagagcgaggctgaaaatgagcccgacgccctgctgcagccccccattaggagcccagaaaacacggattggcagcgagttattgagtatcatagggaaaatgatgagcccagaggaaatggcaagtttgacaagacgggcaacaatgactgtgacagtgaccagcatggcagacagcccaggcttggaagcttcaccagtatcaggcacccatctcccagacaaaaggagcaaccagagcatagtgaagccttccaagcaagttctgacacattggtggctgtagagaaatcttacagtacctcgagtcccatagaagaggactttgaaggaatacaaggtgcatttgcccaacctcaagtctctggtgaggaaaagttccaaatgagaaaaattcttggaaagaatgctgagattttgcccaggtctcaatttcaacctgtacgaagtactgaagatgaacaagaagagacatcaaaggagtcaccaaaggaactgaaagagaaagacatatcattgacggatattcaagacctgtctagtatctcctatgaaccagacagctcttttaaggaagcttcatgcaaaacacccaaaataaaccatgcacctaccagtgtcagcactccactcagcccagggtccgtttcttcagctgccagtcagtataaagactgccttgaaagtatcacatttcaggttaagacagagtttgcctcttgctggaacagtcaagaatttattcaaactttgtctgatgactttataagtgtccgagagagagcaaagaaactggattctctccttacttcctctgaaactcccccttcaagactgactggtcttaaaagattgtcttcatttattggggctggatcccccagccttgttaaggcatgtgactcatcaccaccccatgccacccagagaaggagcctgcctaaagtagaagccttctcacagcatcacattgatgagctgccaccaccatctcaggagctacttgatgacattgagctcttgaaacagcagcagggctcatccacggtgttgcatgagaacacagcaagtgatggaggaggcactgcaaatgatcaaaggcacttagaagaacaagaaactgacagtaaaaaagaagatagtagtatgcttttgtccaaagaaactgaagatcttggagaggacacagagagagctcactctactctggatgaggacctggaaagatggctgcagccacctgaggagagcgtggagctacaagaccttcccaagggctctgaaagggagacaaatatcaaagatcaaaaagttggtgaagagaaaagaaaaagggaagatagcattacaccagagagaaggaaatcagagggtgttctagggacttctgaagaagatgaactaaaatcctgtttttggaagcgactaggttggtccgaatcatccaggataatcgtgctggatcagagtgacttgtcagactgattggaattggatcatagacggactcctggcctgagtttgagtgtcctggttgtaagctcctttcttctctttctgcttcagttgctgtcagggcagcagttccagttctgtaagtctcactttgttcagctgccacaatagacatcatcgtttggccctctctgttagcagcacattcaaccatttgttttcagtcagatttctgaaaagtgagaggtagttttgatagtaaaaatttttggttgtgcctagaatggctttggttttgttgatgttaattttcaaaaactttaactcttgttatataataaaatgtttaattttaataaca

SEQ ID NO: 28215 - DNA, 4500 bp, Homo Sapiens
gtcggtgcctgcagggctctccgtgcccgctcgggagaggtgctcttcgctcaggctcccccggagacttgagggggtgcgcgctggcgtgcatggggcctgttctgtccttggtttggggatgctcctaaggggggagaaagggatacctcgggtgcttggaggtcgagagacggatacgtaagtgcgcaagggccactgattagggcacgggaagggctcgctagaatgagctcttaaactggttgggtgtaagcggttttgggctagtctaaaccaaacaactgagaataaacgcggggttcctgcaggttgagagagtacctgtctgcaaatgtccagtagtgatggattgccttgtaggccccagagcaatcggggaagttagcattcttgttcaagaagctgctggttcacttagagctataaaagaatgttgtgagtttggattttcttccaaacgttcaggattgaggttagggctggtggtgagggatcatgtaaagaggtttgagtggctcagccttaggtcccggtgtggaaagcttattcttttggtgtcatcacgtggccatgggaattatttagaatgtgatctgccctcatgagaagaaaggagctctgaagccgttgcagttcttcctccctatgtggaaaatcgaatttctggaaacatcctccgtattgggagattttgcctatgtaaaggctatccttattggctagcggcactaattactttaaaagtaggatggaagtacaagtatctcaagcatcattgggtttcgagctcacttctgtggaaaagagtttaagggagtggtctagactttccagggaagttattgcctggctgtgtccctctagtcctaattttatacttaactttcccccacctccttcagcctcatctgtttcaatggtgcaactcttttcatccccttttggttaccagtcaccttcaggccattcagaggaggaaagagaggggaatatgaagtcagccaagccccaagtgaaccacagtcagcatggggaaagccagcgggccttgagccccctgcagtctactctgagttctgctgcatctccttcccaagcgtatgagacctatattgaaaatggactcatatgccttaaacacaaaattagaaacatcgagaaaaagaagctcaaactggaggattataaggatcgcctgaaaagtggagagcatcttaatccagaccagttggaagctgtagagaaatatgaagaagtgctacataatttggaatttgccaaggagcttcaaaaaaccttttctgggttgagcctagatctactaaaagcgcaaaagaaggcccagagaagggagcacatgctaaaacttgaggctgagaagaaaaagcttcgaactatacttcaagttcagtatgtattgcagaacttgacacaggagcacgtacaaaaagacttcaaagggggtttgaatggtgcagtgtatttgccttcaaaagaacttgactacctcattaagttttcaaaactgacctgccctgaaagaaatgaaagtctgagtgttgaagaccagatggagcagtcatccttgtacttttgggaccttttggaaggtagtgagaaagcagtggtaggaacgacatacaaacacttgaaggatctactgtctaaattgctgaactcaggctattttgaaagtatcccagttcccaaaaatgccaaggaaaaggaagtaccactggaggaagaaatgctaatacaatcagagaaaaaaacacaattatcgaagactgaatctgtcaaagagtcagagtctctaatggaatttgcccagccagagatacaaccacaagagtttcttaacagacgctatatgacagaagtagattattcaaacaaacaaggcgaagagcaaccttgggaagcagattatgctagaaaaccaaatctcccaaaacgttgggatatgcttactgaaccagatggtcaagagaagaaacaggagtcctttaagtcctgggaggcttctggtaagcaccaggaggtatccaagcctgcagtttccttagaacagaggaaacaagacacctcaaaactcaggtctactctgccggaagagcagaagaagcaggagatctccaaatccaagccatctcctagccagtggaagcaagatacacctaaatccaaagcagggtatgttcaagaggaacaaaagaaacaggagacaccaaagctgtggccagttcagctgcagaaagaacaagatccaaagaagcaaactccaaagtcttggacaccttccatgcagagcgaacagaacaccaccaagtcatggaccactcccatgtgtgaagaacaggattcaaaacagccagagactccaaaatcctgggaaaacaatgttgagagtcaaaaacactctttaacatcacagtcacagatttctccaaagtcctggggagtagctacagcaagcctcataccaaatgaccagctgctgcccaggaagttgaacacagaacccaaagatgtgcctaagcctgtgcatcagcctgtaggttcttcctctacccttccgaaggatccagtattgaggaaagaaaaactgcaggatctgatgactcagattcaaggaacttgtaactttatgcaagagtctgttcttgactttgacaaaccttcaagtgcaattccaacgtcacaaccgccttcagctactccaggtagccccgtagcatctaaagaacaaaatctgtccagtcaaagtgattttcttcaagagccgttacaggctacttcttctccagttacttgtagctcaaatgcttgcttggttactaccgatcaggcttcttctggatctgaaacagagtttatgacctcagagactcctgaggcagcaattcccccaggcaagcaaccgtcttcactagcttctccaaatcctcccatggcaaagggctctgaacagggcttccagtcacctccagcaagtagtagttcagtaaccattaacacagcaccctttcaagccatgcagacagtatttaacgttaatgcacctctgcctccacgaaaagaacaagaaataaaagaatccccttattcacctggctacaatcaaagttttaccacagcaagtacacaaacaccaccccagtgccaactgccatctatacatgtagaacaaactgtccattctcaagagactgcagcaaattatcatcctgatggaactattcaagtaagcaatggtagccttgccttttacccagcacagacgaatgtgtttcccagacctactcagccatttgtcaatagccggggatctgttagaggatgtactcgtggtgggagattaataaccaattcctatcggtcccctggtggttataaaggttttgatacttatagaggactcccttcaatttccaatggaaattatagccagctgcagttccaagctagagagtattctggagcaccttattcccaaagggataatttccagcagtgttataagcgaggagggacatctggtggtccacgagcaaattcgagagcagggtggagtgattcttctcaggtgagcagcccagaaagagacaacgaaacctttaacagtggtgactctggacaaggagactcccgtagcatgacccctgtggatgtgccagtgacaaatccagcagccaccatactgccagtacacgtctaccctctgcctcagcagatgcgagttgccttctcagcagccagaacctctaatctggcccctggaactttagaccaacctattgtgtttgatcttcttctgaacaacttaggagaaacttttgatcttcagcttggtagatttaattgcccagtgaatggcacttacgttttcatttttcacatgctaaagctggcagtgaatgtgccactgtatgtcaacctcatgaagaatgaagaggtcttggtatcagcctatgccaatgatggtgctccagaccatgaaactgctagcaatcatgcaattcttcagctcttccagggagaccagatatggttacgtctgcacaggggagcaatttatggaagtagctggaaatattctacgttttcaggctatcttctttatcaagattgaaagtcagtacagtattgacaataaaaggatggtgttctaattagtgggattgaaggaaaagtagtctttgccctcatgactgattggtttaggaaaatgtttttgttcctagagggaggaggtccttacttttttgttttccttcctgaggtgaaaaatcaagctgaatgacaattagcactaatctggcactttataaattgtgatgtagcctcgctagtcaagctgtgaatgtatattgtttgcacttaatccttaactgtattaacgttcagcttactaaactgactgcctcaagtccaggcaagttacaatgccttgttgtgcctcaataaaaaagttacatgcaaaaaaaaaaaaaaaaa

SEQ ID NO: 28216 - DNA, 4497 bp, Homo Sapiens
gtcggtgcctgcagggctctccgtgcccgctcgggagaggtgctcttcgctcaggctcccccggagacttgagggggtgcgcgctggcgtgcatggggcctgttctgtccttggtttggggatgctcctaaggggggagaaagggatacctcgggtgcttggaggtcgagagacggatacgtaagtgcgcaagggccactgattagggcacgggaagggctcgctagaatgagctcttaaactggttgggtgtaagcggttttgggctagtctaaaccaaacaactgagaataaacgcggggttcctgcaggttgagagagtacctgtctgcaaatgtccagtagtgatggattgccttgtaggccccagagcaatcggggaagttagcattcttgttcaagaagctgctggttcacttagagctataaaagaatgttgtgagtttggattttcttccaaacgttcaggattgaggttagggctggtggtgagggatcatgtaaagaggtttgagtggctcagccttaggtcccggtgtggaaagcttattcttttggtgtcatcacgtggccatgggaattatttagaatgtgatctgccctcatgagaagaaaggagctctgaagccgttgcagttcttcctccctatgtggaaaatcgaatttctggaaacatcctccgtattgggagattttgcctatgtaaaggctatccttattggctagcggcactaattactttaaaagtaggatggaagtacaagtatctcaagcatcattgggtttcgagctcacttctgtggaaaagagtttaagggagtggtctagactttccagggaagttattgcctggctgtgtccctctagtcctaattttatacttaactttcccccacctccttcagcctcatctgtttcaatggtgcaactcttttcatccccttttggttaccagtcaccttcaggccattcagaggaggaaagagaggggaatatgaagtcagccaagccccaagtgaaccacagtcagcatggggaaagccagcgggccttgagccccctgcagtctactctgagttctgctgcatctccttcccaagcgtatgagacctatattgaaaatggactcatatgccttaaacacaaaattagaaacatcgagaaaaagaagctcaaactggaggattataaggatcgcctgaaaagtggagagcatcttaatccagaccagttggaagctgtagagaaatatgaagaagtgctacataatttggaatttgccaaggagcttcaaaaaaccttttctgggttgagcctagatctactaaaagcgcaaaagaaggcccagagaagggagcacatgctaaaacttgaggctgagaagaaaaagcttcgaactatacttcaagttcagtatgtattgcagaacttgacacaggagcacgtacaaaaagacttcaaagggggtttgaatggtgcagtgtatttgccttcaaaagaacttgactacctcattaagttttcaaaactgacctgccctgaaagaaatgaaagtctgagtgttgaagaccagatggagcagtcatccttgtacttttgggaccttttggaaggtagtgagaaagcagtggtaggaacgacatacaaacacttgaaggatctactgtctaaattgctgaactcaggctattttgaaagtatcccagttcccaaaaatgccaaggaaaaggaagtaccactggaggaagaaatgctaatacaatcagagaaaaaaacacaattatcgaagactgaatctgtcaaagagtcagagtctctaatggaatttgcccagccagagatacaaccacaagagtttcttaacagacgctatatgacagaagtagattattcaaacaaacaaggcgaagagcaaccttgggaagcagattatgctagaaaaccaaatctcccaaaacgttgggatatgcttactgaaccagatggtcaagagaagaaacaggagtcctttaagtcctgggaggcttctggtaagcaccaggaggtatccaagcctgcagtttccttagaacagaggaaacaagacacctcaaaactcaggtctactctgccggaagagcagaagaagcaggagatctccaaatccaagccatctcctagccagtggaagcaagatacacctaaatccaaagcagggtatgttcaagaggaacaaaagaaacaggagacaccaaagctgtggccagttcagctgcagaaagaacaagatccaaagaagcaaactccaaagtcttggacaccttccatgcagagcgaacagaacaccaccaagtcatggaccactcccatgtgtgaagaacaggattcaaaacagccagagactccaaaatcctgggaaaacaatgttgagagtcaaaaacactctttaacatcacagtcacagatttctccaaagtcctggggagtagctacagcaagcctcataccaaatgaccagctgctgcccaggaagttgaacacagaacccaaagatgtgcctaagcctgtgcatcagcctgtaggttcttcctctacccttccgaaggatccagtattgaggaaagaaaaactgcaggatctgatgactcagattcaaggaacttgtaactttatgcaagagtctgttcttgactttgacaaaccttcaagtgcaattccaacgtcacaaccgccttcagctactccaggtagccccgtagcatctaaagaacaaaatctgtccagtcaaagtgattttcttcaagagccgttacaggctacttcttctccagttacttgtagctcaaatgcttgcttggttactaccgatcaggcttcttctggatctgaaacagagtttatgacctcagagactcctgaggcagcaattcccccaggcaagcaaccgtcttcactagcttctccaaatcctcccatggcaaagggctctgaacagggcttccagtcacctccagcaagtagtagttcagtaaccattaacacagcaccctttcaagccatgcagacagtatttaacgttaatgcacctctgcctccacgaaaagaacaagaaataaaagaatccccttattcacctggctacaatcaaagttttaccacagcaagtacacaaacaccaccccagtgccaactgccatctatacatgtagaacaaactgtccattctcaagagactgcaaattatcatcctgatggaactattcaagtaagcaatggtagccttgccttttacccagcacagacgaatgtgtttcccagacctactcagccatttgtcaatagccggggatctgttagaggatgtactcgtggtgggagattaataaccaattcctatcggtcccctggtggttataaaggttttgatacttatagaggactcccttcaatttccaatggaaattatagccagctgcagttccaagctagagagtattctggagcaccttattcccaaagggataatttccagcagtgttataagcgaggagggacatctggtggtccacgagcaaattcgagagcagggtggagtgattcttctcaggtgagcagcccagaaagagacaacgaaacctttaacagtggtgactctggacaaggagactcccgtagcatgacccctgtggatgtgccagtgacaaatccagcagccaccatactgccagtacacgtctaccctctgcctcagcagatgcgagttgccttctcagcagccagaacctctaatctggcccctggaactttagaccaacctattgtgtttgatcttcttctgaacaacttaggagaaacttttgatcttcagcttggtagatttaattgcccagtgaatggcacttacgttttcatttttcacatgctaaagctggcagtgaatgtgccactgtatgtcaacctcatgaagaatgaagaggtcttggtatcagcctatgccaatgatggtgctccagaccatgaaactgctagcaatcatgcaattcttcagctcttccagggagaccagatatggttacgtctgcacaggggagcaatttatggaagtagctggaaatattctacgttttcaggctatcttctttatcaagattgaaagtcagtacagtattgacaataaaaggatggtgttctaattagtgggattgaaggaaaagtagtctttgccctcatgactgattggtttaggaaaatgtttttgttcctagagggaggaggtccttacttttttgttttccttcctgaggtgaaaaatcaagctgaatgacaattagcactaatctggcactttataaattgtgatgtagcctcgctagtcaagctgtgaatgtatattgtttgcacttaatccttaactgtattaacgttcagcttactaaactgactgcctcaagtccaggcaagttacaatgccttgttgtgcctcaataaaaaagttacatgcaaaaaaaaaaaaaaaaa

SEQ ID NO: 28217 - DNA, 2445 bp, Homo Sapiens
cgagcgggactggctgggtcggctgggctgctggtgcgaggagccgcggggctgtgctcggcggccaaggggacagcgcgtgggtggccgaggatgctgcggggcggtagctccggcgcccctagctggtgactgctgcgccgtgcctcacacagccgaggcgggctcggcgcacagtcgctgctccgcgcgcgcgcccggcggcgctccaggtgctgacagcgcgagagagcgcggccctcaggagcaaggcgaatgtatgacaccatgtccacaatggtgtacataaaggaagacaagttggagaagcttacacaggatgaaattatttctaagacaaagcaagtaattcaggggctggaagctttgaagaatgagcacaattccattttacaaagtttgctggagacactgaagtgtttgaagaaagatgatgaaagtaatttggtggaggagaaatcaaacatgatccggaagtcactggagatgttggagctcggcctgagtgaggcacaggttatgatggctttgtcaaatcacctgaatgctgtggagtccgagaagcagaaactgcgtgcgcaggttcgtcgtctgtgccaggagaatcagtggctacgggatgaactggccaacacgcagcagaaactgcagaagagtgagcagtctgtggctcaactggaggaggagaagaagcatctggagtttatgaatcagctaaaaaaatatgatgacgacatttccccatccgaggacaaagacactgattctaccaaagagcctctggatgaccttttccccaatgatgaagacgacccagggcaaggaatccagcagcagcacagcagtgcagccgcggctgcccagcagggcggctacgagatccccgcgcggctgcggacgctccacaacctggtgatccagtacgcctcgcaggggcgctacgaggtagctgtgcccctctgcaagcaggccctggaggacctggagaagacttcaggacacgaccacccggacgtggccaccatgctcaacatcctggccttggtgtacagggatcagaataaatacaaagatgcagctaacctactgaatgatgccttggctattcgtgagaaaactttgggcaaagatcatcctgcggtggcggcgactttgaataaccttgcagtcctttatggtaaaagagggaagtacaaagaagcagagccgttgtgtaaaagagctctggaaatccgagaaaaggttttggggaaggatcaccccgatgttgccaagcagttaaataacttggccttactgtgccagaaccagggcaagtatgaagaagtagaatattattatcaaagagccctcgagatctaccagacaaaactgggacctgatgaccccaacgtggctaagacgaaaaataacctggcatcctgctatttgaaacaaggaaagttcaagcaagcagaaacactgtacaaagagattctcactcgtgcacatgaaagggagtttggttctgtagatgatgaaaataaacccatctggatgcatgctgaagaaagagaagaatgcaaaggaaagcaaaaggatgggacatcttttggagagtatggcggctggtacaaagcctgcaaagttgatagtccaactgttacaaccactctaaaaaaccttggggcactttacagacgtcaaggcaaatttgaagctgcagaaacgttagaagaagctgctatgaggtctcgtaaacagggtcttgacaatgttcacaaacagagggtggcagaagtgctcaatgaccctgagaacatggagaagcgcaggagccgtgagagcctcaacgtggacgtggtcaagtacgagagtggccctgacggaggggaggaagatggcactggatctttaaaacgcagtggttcctttagcaaactccgggcttccattagacgcagcagtgagaagctggttaggaagctgaagggaggaagttcacgagagagtgagccaaagaaccccggggcgtctctggccgagcctctttttgtggaaaacgacagcagcagcagtggcctggaagacgccaccgctaactgaccccgacctggccccgctccaggatgggactgccgagtgtggcccggagctggcccgggacagccagggcggcagggagggcccctggccgggagccgcagcgctcactcatttctcctgcgtctgtgtgcataggacatgatactaataaccacacggctggcgtgaccttggggctggggctgggcctaagctggtgccctggtgcggcgtggtctctcccaggagacctggggcatgagctgggcccacggctcccttccacatgtgtaacttccttcacgttgtgtgcgataacgtattttattgtacatttttttaaattaaaagtttatatgccttaaaaaaaaaaaataaaaa

SEQ ID NO: 28218 - DNA, 2207 bp, Homo Sapiens
cgagcgggactggctgggtcggctgggctgctggtgcgaggagccgcggggctgtgctcggcggccaaggggacagcgcgtgggtggccgaggatgctgcggggcggtagctccggcgcccctagctggtgactgctgcgccgtgcctcacacagccgaggcgggctcggcgcacagtcgctgctccgcgcgcgcgcccggcggcgctccaggtgctgacagcgcgagagagcgcggccctcaggagcaaggcgaatgtatgacaccatgtccacaatggtgtacataaaggaagacaagttggagaagcttacacaggatgaaattatttctaagacaaagcaagtaattcaggggctggaagctttgaagaatgagcacaattccattttacaaagtttgctggagacactgaagtgtttgaagaaagatgatgaaagtaatttggtggaggagaaatcaaacatgatccggaagtcactggagatgttggagctcggcctgagtgaggcacaggttatgatggctttgtcaaatcacctgaatgctgtggagtccgagaagcagaaactgcgtgcgcaggttcgtcgtctgtgccaggagaatcagtggctacgggatgaactggccaacacgcagcagaaactgcagaagagtgagcagtctgtggctcaactggaggaggagaagaagcatctggagtttatgaatcagctaaaaaaatatgatgacgacatttccccatccgaggacaaagacactgattctaccaaagagcctctggatgaccttttccccaatgatgaagacgacccagggcaaggaatccagcagcagcacagcagtgcagccgcggctgcccagcagggcggctacgagatccccgcgcggctgcggacgctccacaacctggtgatccagtacgcctcgcaggggcgctacgaggtagctgtgcccctctgcaagcaggccctggaggacctggagaagacttcaggacacgaccacccggacgtggccaccatgctcaacatcctggccttggtgtacagggatcagaataaatacaaagatgcagctaacctactgaatgatgccttggctattcgtgagaaaactttgggcaaagatcatcctgcggtggcggcgactttgaataaccttgcagtcctttatggtaaaagagggaagtacaaagaagcagagccgttgtgtaaaagagctctggaaatccgagaaaaggttttggggaaggatcaccccgatgttgccaagcagttaaataacttggccttactgtgccagaaccagggcaagtatgaagaagtagaatattattatcaaagagccctcgagatctaccagacaaaactgggacctgatgaccccaacgtggctaagacgaaaaataacctggcatcctgctatttgaaacaaggaaagttcaagcaagcagaaacactgtacaaagagattctcactcgtgcacatgaaagggagtttggttctgtagatgatgaaaataaacccatctggatgcatgctgaagaaagagaagaatgcaaaggaaagcaaaaggatgggacatcttttggagagtatggcggctggtacaaagcctgcaaagttgatagtccaactgttacaaccactctaaaaaaccttggggcactttacagacgtcaaggcaaatttgaagctgcagaaacgttagaagaagctgctatgaggtctcgtaaacagggtcttgacaatgttcacaaacagagggtggcagaagtgctcaatgaccctgagaacatggagaagcgcaggagccgtgagagcctcaacgtggacgtggtcaagtacgagagtggccctgacggaggggaggaaatgaggaaaatgaagctcgggctggttaactgacttgctcagcgtcccatggcctagccgcccgtgactctcacactgtctcctgcatgacgggtggcgcctcccgcagcttcccttctctctccagtgctgcccgctgtgtctagcagcctctaggatcttgtcagagctgcacctctctgtgaactggccattcctttcggtgctgctgtcctttttgggggggttcctgatttctgtatacatgtagctttgccagatatgtacttagtaatataaactgtattaataaaatccatttactgtgtaccaaaaaaaaaaaaaaaaaa

SEQ ID NO: 28219 - DNA, 2555 bp, Homo Sapiens
cgagcgggactggctgggtcggctgggctgctggtgcgaggagccgcggggctgtgctcggcggccaaggggacagcgcgtgggtggccgaggatgctgcggggcggtagctccggcgcccctagctggtgactgctgcgccgtgcctcacacagccgaggcgggctcggcgcacagtcgctgctccgcgcgcgcgcccggcggcgctccaggtgctgacagcgcgagagagcgcggccctcaggagcaaggcgaatgtatgacaccatgtccacaatggtgtacataaaggaagacaagttggagaagcttacacaggatgaaattatttctaagacaaagcaagtaattcaggggctggaagctttgaagaatgagcacaattccattttacaaagtttgctggagacactgaagtgtttgaagaaagatgatgaaagtaatttggtggaggagaaatcaaacatgatccggaagtcactggagatgttggagctcggcctgagtgaggcacaggttatgatggctttgtcaaatcacctgaatgctgtggagtccgagaagcagaaactgcgtgcgcaggttcgtcgtctgtgccaggagaatcagtggctacgggatgaactggccaacacgcagcagaaactgcagaagagtgagcagtctgtggctcaactggaggaggagaagaagcatctggagtttatgaatcagctaaaaaaatatgatgacgacatttccccatccgaggacaaagacactgattctaccaaagagcctctggatgaccttttccccaatgatgaagacgacccagggcaaggaatccagcagcagcacagcagtgcagccgcggctgcccagcagggcggctacgagatccccgcgcggctgcggacgctccacaacctggtgatccagtacgcctcgcaggggcgctacgaggtagctgtgcccctctgcaagcaggccctggaggacctggagaagacttcaggacacgaccacccggacgtggccaccatgctcaacatcctggccttggtgtacagggatcagaataaatacaaagatgcagctaacctactgaatgatgccttggctattcgtgagaaaactttgggcaaagatcatcctgcggtggcggcgactttgaataaccttgcagtcctttatggtaaaagagggaagtacaaagaagcagagccgttgtgtaaaagagctctggaaatccgagaaaaggttttggggaaggatcaccccgatgttgccaagcagttaaataacttggccttactgtgccagaaccagggcaagtatgaagaagtagaatattattatcaaagagccctcgagatctaccagacaaaactgggacctgatgaccccaacgtggctaagacgaaaaataacctggcatcctgctatttgaaacaaggaaagttcaagcaagcagaaacactgtacaaagagattctcactcgtgcacatgaaagggagtttggttctgtagatgatgaaaataaacccatctggatgcatgctgaagaaagagaagaatgcaaaggaaagcaaaaggatgggacatcttttggagagtatggcggctggtacaaagcctgcaaagttgatagtccaactgttacaaccactctaaaaaaccttggggcactttacagacgtcaaggcaaatttgaagctgcagaaacgttagaagaagctgctatgaggtctcgtaaacagggtcttgacaatgttcacaaacagagggtggcagaagtgctcaatgaccctgagaacatggagaagcgcaggagccgtgagagcctcaacgtggacgtggtcaagtacgagagtggccctgacggaggggaggaagtgagtatgagcgtagagtggaacgggatgaggaaaatgaagctcgggctggttaactgacttgctcagcgtcccatggatggcactggatctttaaaacgcagtggttcctttagcaaactccgggcttccattagacgcagcagtgagaagctggttaggaagctgaagggaggaagttcacgagagagtgagccaaagaaccccggcatgaagcgtgccagctctctgaatgtccttaacgtgggtggcaaggctgctgaagatcgctttcaagaacgaaataattgtctggccgactcgcgagctctgagtgccagccacactgacctggcccactgagagccagcagggctaggtaacctgtcttgggagtgtgagaccgccccgccctgccacgcccctcaccgccctgcccggaggcgccagccgcactccttggcttcccttcctagatagtgacgtccaccaaccttggaggtgccttttcaaaacacccgggaggccgtgcctcagcattctgttacccggcctgcagccccagtgccaggagccaccccgaccgcgacccggccaggctggctcagggaggccgaggtggcgctgaggtggcttcagcacgctggggattggctcctgctcacggatgctgttgcatttcctgcctgccacctttt

SEQ ID NO: 28220 - DNA, 45840 bp, Homo Sapiens
gctgactcactgcccctctacattgcattttggggtgtggggatttccagagcaggattctccagagaggagtatccaagctccctcctcccgcagcagggggatgctgggctaactgcctggttcggtcccccgtgagtggtctgctgtgttttggttctgtttgtttgtgtgtgttttgcctatgactttgcgaaatattccaagacaagagccagaaagtcttggtctctgaagacaagcacaatgttgctttcagcttaaatatctactgggaaacctcaagatttttaatgtcatcattatgaaaaacagagattataaaaggaaaccgtcgcatttcactcgctggcccccagtgggattggatctgacctcagtgtatcttttctttggtaggttttaagtcttgacaaaatgtgcctaagaatgaagactccaaaaaggatgcagtagattcggggggagtgggggttggaaagaggcttaaatcttcacatgacacctggaatatggtcaaaatgtacctgctcaagttgaaccaggtattgcgtcctccttttaccccatcgctagtgaagacaaccaccgcctggggagacgctccttttccgaaacactcgagtcccgccgcgtcccggacgctccgctttccccgcgcccggatcctcccgggaacccgcgccccgcccgcgcgctggtcccgcccccgccgcctccccgcgcgcagccgcccgaacacgcccagaccgagcgcttgaggtgccgcagccgccgccgccgccgccgccgcgatgtgaccttcagggccgccaggacgggatgaccggagcctccgccccgcggcgcccgcggctcgcctcggcctcccgggcgctctgaccgcgcgtccccggcccgccatggccccttcgctctcgcccgggcccgccgccctgcgccgcgcgccgcagctgctgctgctgctgctggccgcggagtgcgcgcttggtgagtcccgcgggcccgagaccccgtccccgggcggcgggaggaggctccgggcgcggcttgacgcgtccccctctctccctccgggcagccgcgctgttgccggcgcgcgaggccacgcagttcctgcggcccaggcagcgccgcgcctttcaggtcttcgaggaggccaagcagggccacctggagagggagtgcgtggaggagctgtgcagccgcgaggaggcgcgggaggtgttcgagaacgaccccgagacggtgagcagccggcgggcgggatgcgggggaacccctggcgcccgcgcgcctccaaccgctcccgagaggcagcgctgctgccgccccccagctccgcgcggcgaggcctggcctcagggtcccaggagccccggcccgccccgcgtcccccacgcccatcccccggcgaccccgggatccccgcgcaggccggtgagacgctgcggggctgtccgggaaacgctcgctgtcagacgcctccccgcggggaagccgggagtccgtttccaaagtgcgagagaaacacaatggttaaaacccaaaccgcttccccgcggccctccctctgctgggctggaggtgaggaacccccgggccgcgcctcgtcctcctgagaggggtggagagcagtcccctcccgaaagaggaattgaaagggccgagggcgggaactgcttgcggcagcaggtccaaaaataagattccaggaatcgagcggggccgcatgcgggaggggagggcggctccgcggccccgttctgccaggtgctctcctggaggcagcgggtgctttcaggagcccgacggtgctggccccggcacctcggttaggaatgtccttggagaaggcggggcgcccggggccgcctcccgcaggagccgccgtgtgaggacggcctggccactctatcctgcgggctcgggagcgggtgactttggaaagtccgagaaggtgtggattcccgttgacgtccctcccgccctgaagtcagggtgatttcatagcgaagttttccgttctgctggaatgttccttttaaagaattctcctggggtggaataaatgtcacccgggatgaaagagtggttctggatgaaccatggaggcctgtttccgcttacatttctagtggttgacttgacccctcttagatctgcctttctgaaagctctgaggctgtcagatggccactgtgcacttgtggacatagctcatccctgcagagatgacgcacctggggctgttgcccgggggctgcccacagccccacaggcccgtgccctccttcagctcagcctagcttggtcgctctccccggcctctctgttttcctgtttctttaatgatgaatcctggcctgtgctgctggctgaggcaggtgggcctgtgtgccctggtcgctcggagtcgccgcccagctgtggggttggtcgtgtggctggtgcagtgtcctccaacagcgtcctcacccggaacattctgcgtgcacagggactgtggcatggggcgtgctggtgatgggagttgagggcagcagggtcacccccaccccacagtacccgctccgcgcagccctgcaaggcctggccgcagcccctcctcgctgtcctccaggacctgcagggcccatgtcaatcagactggacgctgcctggatgtactgtgctgttcttcccaagtcagtcccctacctggttttccaattttaatttaataactttatttacaaaggtgtgaaatgaagataagaaaatgaaaacagcactcaggaccccatcactttaatacaactgcggttgcgtcacatggtttctgtgctggcatgttcatctcctcaccctcctgcatgtggctgagtggctttggtgcccgggaggcatccctcccatcctctcacagcctggccccagcagcctctgtcggcttcttttcagcgtcatctcagttcccagcgttctgccctccttcccagcccccatgccaaatgataacaacccgctttccctctggtttttggatctggccattagcttgctgtctgtttctgtttctgtttccggttcctgccggcaggtggatgctggggacagcctggttggggcaggggcaggggcagggtccagaggctggcttgagtcccagccggctccagcacaccaggcccacccctcccaggaccctagtctccactgcatcctctgccacactcttgggagaccccaggcccgaggggactgtccaagcacaacttcctgctaatgcatgaaaatcatccatgaacttctccctgtcaaaggccaggggctccttgtctttgaaatgttgctcactttacattttgtgcagtgcggctgattgaggaaaagggctgtggcctgagctcaagaggtgaccaggacctggccatggtgactgtcagagcatccttgggtccctggcctccccaggcccaggatcctgatgtgtggtcctccacgggtggttgtagggaaggtggtcccagccccctgccattttaggatgtgggaagtgcctggccgccgttagttaacacgcacctacccagccctggctgtttcccctgggcaggctcctacgagggagggaagggacagctggagccagctctccagtgtgctcaccttcatgtccacctgctaaactgctaacctgcccgaagtgtgtcccactgccccttgctggggcatcttcctggttgcgccttcttcccggaagcacccgctgtgcagcccttccagcaggcagatactaagcccggcacccctcccaggctccaggctcacttgtgtgctaacctctgtgcccacctggccacctgctcacctgcctgaagcgtgtcccactgccccaagctggggctgcttcctggttgtgagggaagtgcctgctctgcagacccccaccttccagcaggcggatactaagcccagcacccctcccaggctctggccctccccacacacctgtggtttcaagccctgttctgctggaagggacactcctcccacctccccagccctctctgctggagccgtgcccctcccccgacattcctccaggctgggccacccccacatgcctccttgctctccaccgcccagaccttctccttatcttgttttcctttttatattgttgttctccctccctggccttgcctctccctgctgggttccttgcccgagtttctaattcagagaagactgggtaactccccacagtgtctctgctaaagcttcccaggcccagtgactttttactaaatcctcgaaggccatcaggttccagggcctgctgaggtctccataatcaccccttgattccagaaatgatccgagactagagacttatcccagcccagccctactgcccaggtcctccggtgcctgcctgggagcctgtttgtgcactttgatccccggcctgcctgccggaaaatcatccaggctgtggttcctgatcccatcacctggctttatctgagatacaaagcacaatattcaccgagggctggtggccttccctgagggttggcctggattagcaacctgcacctgtacccgcacctgcacgacatgtggccaggcctgtgctccgaggccaggtttcccttcccccatctctttctttgtctccctctgtgtttctctctctgtcccagtctctctcttctccccactgctggtggtgaggaattctccgcatgggatgttggtgcatccgttttcaaacttgctggctcatcctgaactgcatgtgccctccaagcaccttttccctgaccttgtggattctttgggaacagctggggaaggggtaccctttatggaaatgaaaacccctctgagtccccacttgggaacagccacttggctgggacacaggcccagatgttgggatggcctaaagggaggtccctgttggaggggagggctgtacaatgtgggggcgcctggtggggaaggtgatggccaggctgagacctcccctgccctgccttgacagaggctgcagcacactcccacacacagacacatgcacacacattcacacatggacaccagcacagataggtgctgactcatggatacaggtgtgcagggacacacacacccctacctagacacatgcacacatgtacatatgttcccatagacacagatatacatgcacacacacaggcacacacatactaacagacatgtacatacgtatgcacacattcacatagatatacgtacacacacacactgacagacatgcacacacataaacaggcacacacacatactaacagacatgtacacatacatgcacacattcacatagacatacgtacacacagtcacacactgtccagacatgcacatacaaggcacacacatactaacagacatgtatacatacatgcacacattcacatagacatacagtcacacagacatgtacacatgcataatgacatgcacacacatactaacagacatgtacacatacatgcacacattcacatagatgtacctacacagtcacacagacatgcatacataggcacacacagacatgtacacatacgtacacagtcacacacacagacatgcacacacaaaggcacatactagcagacatgtacacatacatgcacacattcacatagacatatgtaagcacacagccacacactgacagacatgcacacacatacatgcacacattcacatagacatacgtacacacagtcacacactgtccagacatgcacatacaaggcacacatactaacagacatgtatacatacatgcacacattcatatagacatacagtcacacagacatgtacacacatgcatgacacgcacacacatactaacagacatgtacacatacatgcacacattcacatagacttacatagtcatgtacacacatgcataatgacacacatactaacagacatgtacacatacatgcacacattcacatagacatacatacagtcacagacatgtacacacatgcataatgacacgcacacacatactaacagacatgtacacatacatgcacacattcacatagatgtacatacacagtcacacacacagacatgcatacataggcacacacagacatgtacacatacagtcacaaacacacagacatgcatacataggcacacacagacatgtacacatacgtacacagtcacacacagacatgcacacacaaaggcacatactagcagacgtacacagacatgcacacattcacatagatgtacatagtcacacacagacatgcatacataggcacacagacatgcacacacaaaggcacatactagcagacatgtacacatgcacacattcacatagacatatgtaaacacacagtcacacacactgacagacatgcacacacatgcacacattcacatagacatacgtacacagtcatacactgacagacatgtacacacatgcataatatgcacacatgtacacacagtcacataaatagacacatatacacacacaggcacacatggatgcccagccacatgcatgcagacacacacagacacatgtgcaccctctcacacacttttctctttctacaactttggggtcagaagaccactgacagctgcagcaggatcactaaaaagtgacacaaggtcacggggctctgtggccccagcttcctcagacccccagggtctctccactcccagagccccctgcctgaggggccggagccctgtggccaaggcctttcctcctgggcccatcctgaggcctgcaggtggaccccggcccggcctcctctgagggccgtcttccgtgctggctccgcagccctctcctgtgcccgcacctgtgcagatgcttgttttcacccgggcgtctgcaggcacttggtgccaggctcctccggggctttctcagaggcagccgagtgccaggccctgcacacgacaccctcacccgagccggagagcttcacatctgtggaaaactctaattaaagacgttttgagaaacgctgaacgtctccctttgttatttaggaacaaaacactcttttaggaagcaagtgcttatggcttctttcttgagattctgagtaaaggggcgttaagcttgctagctggggcatgctgagcacttcccaggttatggctttaccccagagcgattgacaggcatccaggtttcctcatgcttcattttcccctgttttctaaggttaaaactgagagctgtttctccaatgcaaagctgcttgtttaagggtttcgtatttgatgttggaaatgctctggactcttccatggtttttatattccagtgatttcactgcaaacctggtgtgtacgccttgtaaattttgaccctggccaagtgaaaggttcattttaaaagttttaaaataaattttaaaggggagctggaagtggaataagttaagaacagtatcagttttgcctttcactctgacagaggcactctctgctctgactgacgggtgttgattaaaagtataatattcaaaagaaatagtaaagtgcattgggccttgttaatgttctactaattttctggggctccgttttcaaattataggtgaaatttttttccttccagtgttagtgcctatgataagaaaatacattttctccacatctgtccacaaacctgctagaccctgttttgtgactacctccccttggaacttggggctccatggaaaacacacagcttgacccagccagccctcagagagcctgggccggtcactgcagtggctggattctcagcataaaaaggccaaacgttcggccaggctgggactggctcccatccaggaccaactgtccacagtacagtaaggccactctctgagtcaacattgtttcttttctgaattgctaagttgaccgtccctgcagaagcagagagggctgcggtgtggcattcctgcccactccaaatgagggcagcccggacgcgggagctctcagggaggcgcagtgggctttgggtgtgtctggactgtctccaccacacctggaagatactgttcacttcctttttacacttgtgggaaatacatgacagtgtttacgggcaggctggctttccgtttatttcaaccctgacaattgaatagcagcagcagatgatgaaactgttcacttcccgatcactcccgttctcagatccatcacttagctcgtccgtcgctcagctcgtctgttagtctgaaagatgaatcgtgcacgggtcctcctgagagtgctgttctcggggtctccatgtgtgaagttgttacatcctcatgacaactgtgtaacagctgtcactgagccattttacagatgtggaaactgaggccctgagaggctgtggagggctacagtgtgtcctgggcatttgagccccacactctgtcattaactcctgtgctcgctgggactgggggagagcaggacgcggcagcacccccggccccactgtgtgctcctctgtgtgcaggcgactgtgagcatactggcacccatgtgagggctgagtggtgctggtgtgggcgcataaagcacagggcggctgcggggagctgggtgtgtgtcagtggctcggagcattagtctcgtgaacatggtctgccaggtgcgtcatgctgggctacagagcccatggctccaccataaatggtggttttgtgtttgaacttgagtgttgctgctcagtgaggccagaggaaggcaccaacctgcaggcctggccggtcctcacaacacggaaggcaaccagtccactagagagacatgtgtcccggccactggaggagtccaagtgacctttaagtctcaccagtcctcagagcaacccaggtgaatttggggcctgagcttggtcgtctggccgaagaccagctcaacttggataaagctggaggagaagcctgtccctcaggcagctgccagggcatctgtgatttctgcttgcgtgcactcttggcgactattggtggtggtcgcagtcagggcatctggttgcctttactgtccttacaccagctgggcagagctcaggctgggagcccagtgggagaggccggggcgtgactcccggcgcagaagcggcagtggcacaccggcgtcccaagcacagctgtccctgccaggcccctgcgcgttggatctttgggttgagtcatgctcgatggtgcagccatcctttcaagggaactgagctgtccagcgtcccatggagcagctccccgtggatccggagaggccgtaaataaacctccccatttgtaagccgggaacacacatgaactttgcaatcgtgtttgtcctgggatcatagaacgtggtggctggcaagacccaggcatcctcatcctgtgctgctgtgaacagaggccggtagcttattgagggaccagtcccagttcgctttctgtggggaagactctgatggaagcctaggccccaaactccaaggttagcacatcttcttggggggattgacacctccaaaggtgaacttgggtccaaggcacgtgtgtgcgacctgaagcatgggtgccgtgtgcaggagacgccctcaccggagatggggaccgagtccacacggctctaactgcagaatcactggccctgtgcccacgactattttattttgctgttttatatgatcacaaagtacactgtcttgtttttcccaaagcatttgcagtgagacatcccacttcctctccacggcagctgttgcgggcacgaggctgctcccaggacagcgatgccaccggggctggggtgggcacggaggaaccctcttccttcctcctccccgccctctgctcccccacagactggcctgtctttagtcagcactttcccaggctcccttctgcccaccacgtgcaaacagtggcgtgtcctgggcctctctccttgtagtgtttcttgtggccagcatccctcccatccaacagctgtgtggcttcctgactggcttctctcagggcccgcaaggatgctgccaaatggccagagacagtcactgctctgcacttcaaagcaggcagccctcggtggggcttgccctgaaagacagcgggccttcctcgatgagagcctgtgctggctcagggcctgtgggggctgcagctctgttccttccctgcgtccacgctcacatgctgaatgttgtgcaccacaggacaccctgctgggggctgtcgggagcatgctctgtgtttggggcagagacgggcagagtgagtctcagcattactgccgtgcagggttgagtctcagcatgacttccatgcagggggagtctcggcgtcactgccatgcggggcgagtctcggcgttaccgccgtgcagctgctggaagccactcgagctcctctgtctcgtttgccatgaagcccatgagagacactgatgtgtgtctcggggcttctgtgagaagagcttggttacccaccgggtcaggcaccacgtcggtgctgtgaggcatggagggtgctcacagctgtgcagtcagctacagaggcctttcccagcatccacatctgaccgggcagtcacaccaggatgagctcccaggaagagggctcccagcaagggagggcgcacctgggtgtgagcttggaggagggcagaggcacctgtcaccgctgaccctgggtgcagatgggcatgccgggtatactgactgtgctttcctggggcctgtctccctccaggtcagcctggggtcctctgggctgggggccatgcactgcctcctgtgggcagtgggatcagcacttccactttgctcagggctagagcaggctgctgcgggtgtgaagacttaggaaacgaattcggaaggaaggaaaggattttgcacttcccaagctagaagaacatgaatagagccgggctgccaggccaagggtctgtaagacggcggctcttcagagagtctgcaaatgctgagaaaggaaggctccccaagggcagttcctgtgggcgttactctgagttttctcatagaagtcaagttcttggaagacagcactatggtcaaagggttagtgaattcttgtgaccatttcccatggaaaatatcagagaaagttatggtgttgataaacagagtccctgtgctcagcagtctccacccacttgtcaagtaagataaagatttttggaaacaaaatttatggctgttatttgctaaagagagtaatacattcttagcacactctgaaaaataaccactatttgctgtatgaatgcagatgaaactcacacaaaaagatttatgcaggactgacatcgggtgtttgcagaaggttctccacgttcactgacctctgatcctcactgcagctctgcggggactgtggcccaaggatgagtgagcgtcaggtcgggccgtgcccttaatcccctggctgcccctcaccaccaggcagagaccttgctgggacccaaggagttaaagtgtattcagagatgaaggtgtttaggaaatgttctggaaccttccaaactgactttaggctgcgtgaggtgcttccagttcagtgcactttgggcccaaaagtgtttcctgtcttgttaatgcactgtgttgtgtgccatcaccgcatggaggttttggccatttttaaaaagtgaatgggccctcccagggtctagttggatcgagagaccactggaaaccctcaccaagctgcaggcaggtaggcaggggccccagagcaggcctaggggaagagtccccccggccccttggagggtctcttcacgtgctgggtgctgcctgattcctgcggtggcatggggaggtcaccccaccttgttctgaaccacagctctgggtgaggaagcctgtcaccaggttaaaggtcatttgggggttggggcgtgagaaccgcagtgccctgctggtagggttgccgcatgggtggccaggctacagcctggtccccgaggccgacccatcctgggaaccctgtgtgcagctccctgccatgcttgacctttgccctgtgggtggctttgagcgggggagacctgggtctggtggtgggcagggcaggggcggaggtggacttgggtctttgtgacactgcaccaattcccatggattctgccggcacccactgccctcctgagcagagcaaaggcagcagaggcggatgccagggtccggaggtggcatctactcatcagacactttctgtagttttataacaaatttggggcctcatgttagaccccagccagaccaggctcctgtcctggggctcagctccctccaagctgcttcaggttcagtttcctccatgcttacgaaaccgaagggcaacgggcacagtcagggaggcgtcagaggaggcaccggctccactgttcacaccgggaccttctgcagacggggctcccagcctcgaccagccccggaacccccagcacggggacgtccaatcttttggcttccgtgggccacattggaagaagaactgtcttgggccacacataaaattaacactaacagtagctgatgagctaaaaagaaggtctgtgcctaaagctcatgttttaagaaagtttacgaatttatgttgggctgcattcatggccatcctgggccactcacagttgcgccagagcctcgggagcacaggccgagcacctgccctgcttcacccagggacggggccctgcactgaccaggaggctgttgccctccaagtcgtccctgccgggaacagcaaagcacacaaacctccgagagacctaatggctgcatcctccgtgcagtgggcaccacgcttgccacctagaagagtgggtttggcagatgtcagttaataacaaggatgtaagttttaaaatcacgtgggggtttgtaaacttgaggaattacagcacaaacacttccatattattaaaagaaacagactgggagcattgattttgacttttcttccaagtacttatctatgatttaagtgaaactgagcattcagtgctctgtgggagtgaaaactgcaggcccttgcacttgcccactgattcattcattcacccatccacccactcattcattcaactatccatgcactcgctcatccatccatccactcattccttcatttattcatccatctccatccatccagtcacccattcacccactcactcatctatccactcactcacccacccattcactcatccattcacccacccactcacccacccacctattcattcattcatgtattcatctatctactcactctcattcacccattcattcattcatctgtccatccattcacctatccacccactcatccattcatgtactcactcatctacccactcactcattctttcattcattcatccattcactcacccatccacccactcattcattcactcatctggccactcactcatccacccactcactcattcattcatacactcactcatccatctattcactcattgttttattcattcatccatccatccatccactcacccatctatctacgcatttattcatttacccactcagtcatccgtccatcctcattcatttatccatccatctccattcatttactcatccacccactcattcattctttcatccacccactcatccatccactcattcatttgttcattcatccatctctatccactcatccattcattcattcccattcactcattcatccactgattcattcattcattcatctggttattcacccatccactcacttatccatccatgcatctgtctgctcactcatccatcctactcactaatctatccaccgattcactcatccatccattcattcattcatctgtgcatttatccatacatgcatctatccatccatctatccatctatcaatccatctgttcagtcattcatccattcactcatccatccatccacccactcattcatgcatccatctgcccatccactcatttattcacccatccattctttcacgcactcatccactgtccatctgtcatccatccatgtgtttggtgacggctcatgaggcctctgggggacagtcagcaccaggctcggtgctgggcaggtagatgttgtctttttcctcttgaagcttcagctaacagtgcagtggcttggggtttgctcacttatttttatctgtagctgttcaaataaaacagaagcagatccccggggaaaggatttccaggggccaaatggcgccatttccagcctgggaatcccagcttcttccccctgttgccctcacctaaccccagcacgccaacccattaccataggtcttgctcttcctaggtttagaagaaagagagtcagtgtgtacataaggagctcctggttctaaattccggcctcctgagtggtggcctctgctccatggggactcctgggggtgctgctctggagatatggctaatgcagggcttcaggccaaggtttatggacctgaacaagcagtagtgcagacaggggtgggagggttttgaggacaaagtgctctgtgtttggttctgcaggtcagggagcttatctgggtgcctttactcaaagccatttctgggtcttacatctttggctagaatgttctcaggacaatgtgaaatgtctttatctcaggagtgtataccagaatgttctcaggacaacgtgaaatgtctttctttcttgggagtgtgtaccagaatgttctcaggaaaatgtgaaatgtctctttttctttctctcaggagtgtatagcgtttttaggtttattcatcttagcttttctcttgctcatggtttaaccatctttcccctagtttgccggtggaattagcatatgctttctgcctccattactgtctcaaataatcaaacatgcaaattaggatacagtgcccagggctataaccctgtggtttcagaaaccccattcccataggtgtggcgaactgacaggagattggcatagtttttccatgaataatgcctttttgcaacaataaaacttggtattaatacagattacacattaagtagtatgactagtcttgattttgaaaaatagaacacacttgctgtaaagctgtggtaatgcaagcatttgtgtatagttaggccgtttgctcactagttcttagttgttttcaatccctggcttctaaacctgaaaggacaccttttgcatccctcgcaagtcttttatttcagagccagagcctcctgctttgagacaaagccccatcacttcccttctccttccaagcctagaaacctggtgccacttcgtgttgctccaggactccaccagggctcacttggtatggctgttcttgccttttcttggagtttgccaacccatgactaaaattggaagtgagagaaatgagggcaggcatgagggtgtgtgttccaggtctgcagccctcctggccttcagggcggccgccctcccaacagacacgtgagctgcacaccagctcaccctgacccttcctttctcttaagggagtaagagtttaagagcatcccatctttcctagaacacaactttgtgaaaacacatccaagcaggcctcaggagggtgttggcaaggctggggcggggcctccaggctcttcccacaaaaggtgtggcaaggccagcaagtgtgggagagaggtgggaaggaggcagaaaggccatgcagagccagcgcatgaagccagaggcgcgttgcagacggcgctgggtacctaccgcctctgtctgctactctgcaaaatgctaccagcgcctgctaatcctgaccttcatgcccccaggtgaatcccacaaccatcctgaagccgggtttcctcattcctgataatgggattaaaaagaccttcctgggtgttatttgtgaggatttcataaaatagtgtaaaaatgctgactcatacccagcatggagaggccgctgggactattctgccatgactgtggtctcttggtttagagcatttagggccaaactgctggcatggttgaccctaagctggagattggaggctgctttaaccaggctgtggccctagaatctgtgggccatggcaaaaggatcctgaagaagtttccggccggcctctgctggccaagtgacaggcaggtggttccaggactcgacagctcacttgtgtcgaatgtggacctcgtcagtgcgctttcatggataagaagacccttcattacagcctccatcctcacccagtaccaattttgtttcaccaatactataagtgcaaatcaatgcccgtgtgccaaaagaaaggtctttggggttttgagagacctttgtgtcaacagggaactaaggtctttgggttttagagacccttatgtcaacagggaactaagagtggggttttacttggaagcattcttgtcctcctgggcaggcctctcccctggacacacctggtagcacttcctacgcagctggaaatggccctgcctttgcttgttggtctcacagcagtcgtgccccggtcacttcccctcagttccccgggtggggcggccctctggctgccccgagagcagcctctgattaaccagctgatgcttatgttgttcagagaccctcgtagtgtgccggtcaatgcttgccttttctttttctttttccacaggattatttttacccaagatacttaggtaagtctcaattacttctctactctggttgtcgtagaggcatagttgggggtgcgtgtttcatgttggaggaatctcctcaccacgtaactcttggaaggaagattcttaatcacatggtgcacgtggaactgtccggaacatgcaggtcagaaacacaagtttctctctttattttataccacagctttattccgtgttagtggaacctcaggtgaatgctgttatctgcaaaccccttctctgagttgatgccaggctcagctccttgtcaggacgtgtaattgattttgtcctccggttttctgacctcagcactaatcacttctgaagtcattgaggaccccaaaggggtccatgttcatgtgggctgtattgactgatatttaccgtattcttaattaaaaccgaaaacactgaatagtgtttctgtttaatttgaagaacgggaatgccagacgttatctcagccatcagagcagctggtgcatgtggggcggcctctggagacccccactgtacacttgggaagggaggacagcaagaaagtgaaacccagagaccccgggtcagcccgtttaactgacaccatcttagagctctttgagagcatttcacttagaaggagagaaatgtattccagggtcttctttttaatgttgcaaagtgcattttagtaaatgtcctcttaaagggtccttccctgggtccatatctggaacaaacacagtgggtctggcactggcccagaaagcccaggcaccagcgaggactgagttctgaagcagggggtggccagcggtccacagcacacctgcaggaggccttccgctgttcatccgtgccgttctgcgcctggataagcaacagtaacccactgaagggccaggtcgagaggccccgcaccgttctgcacaacctcacgcttcgggttatccctggatgtgcatgtgccaggcctcgcctccccccgccgccctagcgggatgtctgctgtcaagctgtgttcagccagccagagagcatggaggggctttctccaaagcagagtggctttccagttaagcacagcgtttcccaatgggggtccactggaaaatgaagtttagcttttcgagtaccgtcaggaacttactgagcattcccggtgattctcccgtatggcaggaggagccccctcgaaacggcgggcggtgctttacgcacttgactgtgggtgcacaactccgctgagttggtggaggtggtttcctgtttgtcagggttggggctaacatgttttttattaacacaagctaagcggcattgtttctggaggatgatagcaccccaggtaagcagagtaactgcctctccagagcgtctcagaagcagaggctctgcagtccatccggtcttgtaaggatgactgacatccattccctttcttcctgcagactgcatcaacaagtatgggtctccgtacaccaaaaactcaggcttcgccacctgcgtgcaaagtaagtcggcctcctttgcgccttcctgggagcactgtgggtttgggcggctttaggcttggctgtggtttgtggagggccctgaatagttctgttttttaaggagctgtggtcccttgccgaggcctgctcccttttcgccaaactttcttttttaaacaagtaaattttgacgtttttagcaataggcaataaatgcacatggaacaaaatgtaaatgtttcacagagtgtgatgtgaaagcccatccccgcctctgagtcgtccagtcagacaccaccgtagttacagttccaagaatcttgtgcttagacatgtaaacatgtgtgagcggccttccgctcttcacacgcgtggcggcttagcacacacggtctgtcccgtgcctctgcaactctgtctgcacaggagaccctctcttagcgtgtctcaccttcacgctggcatttccagccggtgcatcatatgaacttagcccatgcatattggctgatgtccaggttatttccaatttccatcatttaaacaaaactggcgtgacatcctcatgcacctgttgcctcccacacgtctgagtgtctgcgggatgcgttcccaaggatggaatcgcagaggcagtcctcatgtttcctttggatacagatactgccaaattatcccagagccagccttagcctccgcccctgcaggggtgaatgaactgtttttttaaacttttgatctcttccaatgtaacaggcgagaaatgacatcagtcatttcaggtttttttttttttttttaactaatgagtaaagctgtccttcataggtttaaaaactgtgtatttcttttcctataaactgttgtttatattttttgcctgtttttctcaatttgtaggagtttgcacattagccattggtagtaaagttatcaaaaattttttcagcttgccacaagtcttttttattattttaaaattatcatgcaataagattgattgttttgggtgtcctgtatgaattttaacataccttcagcacaacccacacagctccccttgcactgggtctgtggtccgctggcgtcacgtgtgtctagttttagatgaaagtccagcttggtgagtccctgtgggcgctgagagcagaggcgtggcgggacggagtcatcctgggagaggcaggagtctcttcccaggcatggctttggagctggatcccagtcagcagaaggagtcagaggtggctcagtcccgctccccaagccccacgcactgtccgtgggcgtctctggcctcccggacttgtatcacagaccccagcccaagagacacaggcagaggaaatgctcagtgtaaacatgggaatgggagggtggccctgccctgtggcccggcctgccctgacctgcaaccatgcacagtagccaggtgccacgtagggcccaatgtctgcatttggggcagaggctcctgcgtgctcagaggagacaagcagatcctgtcacgcgtgttttatcttagtgattgctaaaccagtctcttcttttaaattctgtattcacacttgttatactctcttagttcctgggctttaggcttctccccaagattacaaaacagttacctgctgttaggtgttttcatctgtgacccgcccgtaatttcttttgacgtgatggatgaggtggggatctagactgcaggctcagttcctgccccaacaccacacatttgagtctgtctcaccccagtgcctcacctgctgccgtcctcatatgctgggtatttgggagattttctgccgggtttccacaggccgtggccacagctttagactcggcctcatgcacgcgggtgggtctcctatgccctcctcagtcttttttctggttgtcttgcttattttttaataaaactaaaccttaaaaatattcttaaaaacctaaaaaagccctttagatatttttaactgggcttgccattcatatatcggagactgtgtctgaacagtgttgcgctttcctaaccccggcaccgtcctgtccgtcccttggagcacttttcttcctgtgcgtcccgtgcttcctttgctcagttcacttctggctatttgcagcaaagaaggccgtccttttcaaggcgtcgcctcgcttccttgcatggatgaagaggagtgattgctacatgttcctttctgttcccgccgcccaatagagttatcttgttttggttatttcctttgtggcatcagcgtccccaagtgcggccagctggggagaggagggcaaggtcaagatccttgagtttgttccctgtgtgataggaagagaatctcttgctgtggctggtgccagaggcaacacatgcagtttctaacgggtccacctgccccaggccagaagctccggccactctccctgagccggccctcagaggctgccctgcctgtggcctggggctctcagcttctcctccagagcacgtggctggggcctctgatgttcgcgtgcctcaaaagatgcctggcggtgaagaaggtgctttggtggcctggccacagcaggcagccttgcactcccttgggaaggcgcctcccggaggatgcagctggggcagcctcacactctgttcctgttcattggttccctcgtgaaaattctctgacttggtgctcacggtgctgtcctggcttcagttcactggttatcggtcattgtgaaattaaagccatagccccataaagtccaaattcagccccagacaagcaggcccccagcgggccttgcatgggagcctgcggccctcaggctgtcccaggacccaggcggcacagtggacggagggaggaggcctgggaagagtgtaggctgcgttcccaggtgcccctgaagagcctctgcttccatttctttcctttcccacggacacacccagcttctccactgcgaacgcgcccgtcctgccatagcggccacttggtgcttggatttctcggctcctttgacccatgggtttccccaggaaggtcaggtccccacaggcggtggcccaggcagcggtcactgagccccggctaccgggatcccacccccgccacggggagtgtcccctcgcccttccctcgggcagacagggctctggtcctcgctcgtcaccacccagggaaaggccctggccgcccgcaccggcttcagattccagccacagccacagccgctccctcctgtccttcaacgcagtcatgggccaagctgagataaacccttcacctcctgaacaggcgctggcgcccagggcatgaccagccaggccaccgataccctaggcccagcttgcgggatggggatcagggaggtgggcgggggtcagggaggtggacggggtcagggaagtgggtgccctcgggggcctgcagaggtttctgtctccatcgctttccctgttgtgtggaggaaattccacagatatttgctgggcaccggctgactgtccacccctcaggtgtggttccgtccttgcatcctagaggtatcaatacattcccaacagggaaataaacaaatgagttgggggaggccccggggcaggtggcatgagtctggggaccgcttaagagctgggcacctggcaggagcaggcactgtccctcagcctcagggacagaggtctttccgaaaggcattccaggcaaagtcaagaccgggttcccagccctttgcatcacatgggcaggtgtccacttctgaaatggctttaatctctaaccaaacatcgtagcggcagcgcacagcatcccccagacatccctccatggtgggggcctctgaggaggtcaggttctggtgccggagggttgggccctgcacaggccgcctgccctgcacgtgtctgactccctcctgcccccagagcctcttcatctgaggccagggtggagaagcggatacgcccctcatttctctagttcaggccagacctccccgttccaggccctgctatgaccacatcgacgtctccagacgccccgcggacacagcacccaggtacagccgggcgacagcagtgtcagggatggggccccggccggctcctggcggctgtgctgatgcagaatccctggtcctggtcctcgtttcctcgtaactccgaaggccagccccagcccctgtgtgcttcagagtagaaagcgtttatagtgacctgctgaaaatagcatcttagaaacacttcgagacgcgagctccgtccacacccacaagtgttctgttgtcagtcatttgtgcaaaacaagcaaacggaggtgtagggaggaaactgtggggtgtactgaggaaactgaggcttatagaggaaactgtgaggcagacggaggaaactgaggtgtatggaggaaactgaagcatacagaggaaattgaggcgtatggaggaaactggggcgtatggaggaaactggggcgtatggaggaaactggggcgtacaaaggaaattgaggcgtatggaggaaactggggcgtatggaggaaactgaggcatatggaggaaactgtggggcgtacagagaaaattgaggcgtatggaggaaactgtggggtgtatggaagaaactggggggcgtatggaggaaattgaggcatatggaggaaactgtggggtgtatggaggaaactgggcatatggaggaaactgtggggcgtatggaagaaactgtggggcgtatggaggaaactgtggggcgtatggaggaaactgtggggcgtatggaggaaactggggggcgtatggaggaaactgggcatatggaggaaactgtggggtgtatggaggaaactgggcatatggaggaaactgtggggtgtatggaagaaactggggggcgtatggaggaaattgaggcatatggaggaaactgtggggtgtatggaggaaactgggcatatggaggaaactgtggggcgtatggaggaaactgtggggtgtatggaggaaaccggggcgtatggaggaaactggggcatacggaggaaactgtggggcgtatggaggaaattgaggcatatggaggaaactggggcatacggaggaaacgcgggtgtacggagcaaactgtgaggcatacggaggaaacgctgtgaggcatacggcgaagcgtcgcagaaagaagccagtgtggttgggcagcttccccaagaagcctgggactcgtagccagggcctctggtgagcgcggtgcctggacccgcctaggaggacaggggctgtgtctgtgccggccacaggcagtgactgtaagccctggatgagctggaggaactcagctttgtgaaccacagacccgcccgccgctcaccctggcaccgggcacccctgaccccggccaggtggggatggaagcggctcctgcactgacagccgagcccagaccctctggtggaaacgccacattctacagacctggtgggaaacgtcaccttgggagcctcaggaacagaagcgacacgctggcagtgagagcccatgcactgaagactcgacgtgcccccaccagggctgaccccttaggacgatgctggcccagtgccctagggccctgctggcccggcctgcacttttcccagggactggtccttattgaacttgtgtggaatcaatggaccggagccctctctcagccagcaggggggccctacccagggttccccacggagccctgtgtggctaagctgagcgtggctgagtcctcatgtggggctgagctgagtgtggaccgcgcccctgagcactgccatgctcagccccgagctgcttctgctctgccagcagccatgaaaggattctttgagctccgggtgtaattgtcgttctttctgccaacttcccggggctcaggcttgcgtaactgcactgtcgggggcttccctgcctgcctctgggacgtggtttgggtccgtgtcctggaagcgtgtttgtgagcagctcctcgtatgaatgtgtttgtgagcagcttctcggatgggggactgcttgggaagcagctgcactggcacgggttcccaccctcaggccctcacccgttcccctgacctctggccctgcaggagctgagcccaggtgaccaccctgagaaagggcagaacacacctggcctaaagccatcaagacacgtggagagggggcagctaagcagaaagaggggggcttcctggaggacccctctggcagtgcagcctgggcctggggtcctccccgccacacccagcagggagagttcaccagagatgggctaggggctggccagggaaggcagaatgttccgagtctgcctggaagcccccaggtcagctgggggttctgtgtgcctactccctgggaggtctgagctcccaggcctcacgccaggcagttcctgctcctttgccctcagcccttcccaccttgcgtccaggcctgctggcactccctcccagttgatctgagttttcctggagccggccccagggcccgccagcctattctgtcagccctaggccagcacagagggctcgggtgcccaggggctgcctcagcctgcgcccctcagagctcctccgggctggacccgagaccccacagccgccccgatctcagctgcgttgggcgcgcaggggtggggcagctgaacatgattttccactttgtgtccccaatcagacctgcctgaccagtgcacgcccaacccctgcgataggaaggggacccaagcctgccaggacctcatgggcaacttcttctgcctgtgtaaagctggctgggggggccggctctgcgacaaaggtacgtgaggctgaagacaaaggcggggtctccctccatctccgaccctgccctgatccccgctcctcactcccactccggggcacggccatcctcaggctgctctccgacagccccaaggaggctgcagccctgaggtatcctggagccccaggagaattgggaggagctgcagtctcctttctgggagcagggctggaaggaaaggaaacaccaagtgatgcctcagcacccactgattgaagggcggggggggaaatttcacctctgaccgtccttgagtgcagacctgtggtgtcagtggcacccactgattgaaaggcgggggggaaatttcacctctgaccgtccttgagtgcagacctgtggtgtcagtggcacccactgattgaaaggccggggggagatttcacctctgaccgtccttcagtgtagacctgtggtgtcagtgaagaccctggaggaagaatagctccagggcctggtggagacccatagtggagagcccagcaggccagcctgtcccctttggcaaatcctaccccacaggtggcctgggagggctttgctaaggagtggccagctctggcctggccttgtctgtcctcggcacccagaggtcactcctggcctgcagcctcctcctgcaagcacatgggcatccagggagctgagccctgtgggctgtgactgccagcagctccccaggctgagaccgcagctggggatcccccatgccctcccaccatctacctccacacgcaaggccaggaccaggggccatgaaacgctagggctgctgagtggggtgtgaggtccaagccctggggtccctctctgctccagggctgggctgtgcacctctaggatctctctctgctcgggggctgggctgtgcactcccaggctctctccctgctccagggctgggctgtgcacacccgcggtcccttcctcctgctccagtgctgggctgtgcacccccccggctccttccctgctccagtgctgggctgtgcacccccgggctccctccctgctccagggctgggctgtgcacccccggggtcccttcctcctgctgcggggctgggctgtgcacccccgggctccctccctgctccagggctgggctgtgcacccccggggtcccttcctcctgctccggggctgggctgtgcacccccgggctccctccctgctccagggctgggctgtgcacccccggggtcccctcctcctgctccggggctgggctgtgcacccctgggctccctccctgctccagggctgggctgtgcacccccggggtcccttcctcctgctccggggctaggctgtgacccctggtctccctccctgctccagggctgggctgtgcacctttgggatctctctctgctccagggctgggctgtgcacctctgggctccctccctgctccagggctgggctgtgcacctctgggatctcttcctaccgtagccaggggctgtgcacccttgggctccccttcaggcctgtgcttgttcccagatgtcaacgaatgcagccaggagaacgggggctgcctccagatctgccacaacaagccgggtagcttccactgttcctgccacagcggcttcgagctctcctctgatggcaggacctgccaaggtaaggccctggggtgaggcctctctcctctctcctctccccaccttctattttcggtcatgtctgctcttctgcaagcggctgctgctggctgggttcctgtggttctggatgggatggggcatcctgcagagactacacaagcccaggccagccgcagcacagggagctgctcggcaccacaccaggatgactcacccggcatctgagggccaggactcagggggccggcccagcccatgaggccacactgctggctgtagggcctcgtccattccccagagcctcacagagcctggaagtgctccaggcacttgtgtagtgagcttgtgggtcagggctccaggctagggtccccccgccgtccactctccccagcatccccagaagcaccccgttgttggtctccctctgtccactaaatatagccctgccctccccacttcctttcatatttcagtctggggttccctcagcccagggccagagctggggagccccaggacaccccagaaagtcactgtgaatgtgcgcgcccccgacgctgttccaggtgctgctgctgccactggccctttgccactttgcagggggagcaccttcctcctccctccccacgttgtatctggacatgcccaggcgtgtccctgagagtttctggcatagttcttagcgctgctgctgactgtccaggacaccgaactgcgtggacaggacagacagttgctcagggagaaacagccccaggatctggagagtgaatctgaccagacaggaggggccacaccccatcccccgatttcaaaaggcagctgctatttctgtccactttggtggttcccttccctgaccacccaggagttagccctgtgtgcagatgacgtgattcccatcttaacacataaacccatttccccgccgaggacagagcccctcccatcactgctctatccctgacctggaagacagcagcaccccaggtttaaagagaggtgaagactaggccgatcctgagagatgacgtctaaagcatctcccgtgggtccctgcaccagtcgggcactcccggcaaagtctaggctcacagttactgcccacagtgacagaggcattcccgtcctctcctcctcctccccatcttcctcttcctccccaccattccccctcctcctttccccactccccctcctcctctccccactccccctcctcctcccccccactccccctcctcctccccatcttcctcctcctcctcatcttcctcctcctctttcttctcctcctccccccactccccctcttcctccccatcttcttcctccccctcctcctcctcattcccctcttcttcctcctcattcccctcttcttcctcctcattccccctcctctttttccccctcctcctcccccatccttatttcccctctcctcctcctcccccacccctccccaccccctccctcacccctccccaccccctccctcacccctccccaccccctccctcacctcctcccccacccctccctcaccttctcctcttcctccctgcttctcctcctcctccccctccgtcgtcctccccctccgtcctcctccccctccgtcctcctccttcccttccccattctcctccccctccccctcctcctccccctcctcctcctccccctcctccccctcctctccatcctctccctaccccctcctcctcccctcctcccctccccctcctcttctccccctccccttctccccctcccccttctccccctcccccttctccccctcctcctcctcctcttcctccttcccctccccccttcctcctcccactcctactcccccttctcctcccccacctttctccgtgcccctgcctttgctctcctctggtgactaaagggctcttcatttcagggttgcccctcctaccccagggtgcttggccgtaaacagcatctgtcccacattagatgctcaagtcttaggattgtggtttaacccggtagtgaaaattgattgaaaccagtaaatgcttctctttggggttggggttttagtttcaaatgcccccggggggttactttttacggccccgtgtcctgtagcaccgtcatttaaatggaacagcacagcgtgcaccgccgccccccacccctccaccaagcagggcccttcccagctctccacctgctgggctgaagtcagccttcccagccgggccttgatcagaagcgtgcaccaacaccccgggagctgcccggtcaggggaggagggcagggaaatggggccagggcgcgctggccccacagagtctggatgcgacctctgggtggtgccctggccagtccctgcagccgcctgccccagccccgtctgagatgccgctgtgctgcggttggccggtttttttttgcttgcagacatagacgagtgcgcagactcggaggcctgcggggaggcgcgctgcaagaacctgcccggctcctactcctgcctctgtgacgagggctttgcgtacagctcccaggagaaggcttgccgaggtacccacgccacgcggtcaccctcgctttctctgacgcccaagtctagacacgggtgccagtcactgcccgagccggttgctaacaaccgggtgcttctggtgaaagaaagtctctttctccctgtttctatcagcctggtaatggcctgtgctaccaccatgcccgcacacacgtgagcacacacaggcacccatgccccttgtgcacatgaacgaaccgcacacatgcatatacaccgcatgtacacacgtgtgtacccttctccacctgcatagacggggcctctccccaaagggacggggagcagcaagcctccctctactgttctctctttccagccgccatggggagggccctgttggccgtagagcctctaagaggggccgtgcccccagtgatgggaacagtggggctgagtaggcagacagagagggtggggaagcccaggctgcctgcactgacctccatttcccaccacagctgtcggcccctctgtgctccgggggacacctcactgcacagcccagaccctgtgcttcccagacctgccttccacaccggcccggcagcgggggtgggtctggctcgttgggagcaccctcctgggacacctgcgacatttttattccctcaagaaagagcccgggcaggagcaggccgagggtgcaacctagctttccagtggggggggacgcgacccccaagccgcccccgttagaatctgcatgtaattccttgagcgcaccttgcgtgtggtttgagcaatcgcggtgtgatcccacggcgggacagcgtagaggcctccccggctcaccgccgcttccctctggctggcagatgtggacgagtgtctgcagggccgctgtgagcaggtctgcgtgaactccccagggagctacacctgccactgtgacgggcgtgggggcctcaagctgtcccaggacatggacacctgtgaggtaggcggcccctggccccgcgggcccttcacggtggttccgggggccctcgccggtgggggctttcgggagaaacacttccgtgaagacctggcctttgctaaggtgttggggatctccagggccatgtggaggtttgggatgagaaacgcttctgttccctggaagatgtttggttgtatttatagagtctctatggcaactcccagctcacagtggatcagcctggtgtggaccccagtgtgacactcacgggggcacggtccccactctgccgcgtgccagggagccaacgtgaccgacctgtcacaccggtgcctgtcacaccgacctgtcacaccggggcctgtcacaccggtgcctgtcacagcatgacctacctgtcacaccggggcctgtcacactggtgcctgtcacaccgacctgtcacaccggggcctatcacagcatgacctacctgtcacactggtgcctgtcacaccgacctgtcacaccggggcctatcacagcatgacctacctgtcacaccggggcctgtcacactggtgtctgtcacaccgacctgtcacaccggggcctgtcacagcatgacctacctgtcacaccggggcctgtcacactggtgcctgtcacaccgacctgtcacaccactgcctgtcacactgacttgtcacaccagtgtctcacaccgacctgtcacaacagtacctgtcacactgacctgtcacaccggtgcctgtcacaccactgcctgtcacactgacttgtcacaccagtgtctcacaccgacctgtcacaacagtacctgtcacaccgacctgtcacaccggtgcctgtcacaccactgcctgtcacactgacttgtcaccggtgtctgtcacaccgacctgtcacactggtgcctgtcacactggtgcctgtcacaccgacctgtcacaccggtgcctgtcacaccgacctgtcacactgacctgtcacaccggtaggaatgcagtacccacatgtggacgtttctgggcagggcggctcttgtctttcctcttcagcctgggcctgtgcctgggggttgatgagagtgagcatttatttaaaaagcaaaaccacaggtggaaagagtcaccaggacagcttctcggagtcgcagacctgggatgcagccgtggggctcttgggtctgggctgcgacgttcagggcttccagccagccctcgccttgaggttctttgcctcgctgcctcatgtactcatgcagagggtgtcggacccctgcgagatgtccagctcaccctggctgcccacggtgggcagggcaggcctggctcagccccagcccctccatcttccaggggtgtcagctcacaccggctttggttctgtcccccttcgggcagcgtggagaaaccacagcccagaacagggaactttccaggacagccatcttcaaggcatccatatctatttcataatagtgtatactttttaatgattctctgtaatttttgtatgcttgaaatatttcataatttaaaaataaagggtcaagggaaatgagcagggaaggagatgacggggacccccgagaagccctgtgggaagcggctgctgcaagcccgcccttcacctgggagtcccagtggggcaggtgtgacagcctctggggtctcagcagctagaggcggggtggccactcccgaggcacaggagggacagtggacccgctgcgcggccggggcgtggggctcaggggagcaggagtgaaggccacatccccgaccggcgtggcccccgtccgtggcaggacatcttgccgtgcgtgcccttcagcgtggccaagagtgtgaagtccttgtacctgggccggatgttcagtgggacccccgtgatccgactgcgcttcaagaggctgcagcccaccaggtgaggaggtgtccacaggaggcaacacaacttagaatggccaagacactggcttcacagggcccgggccagggttcggccagcagggaggggccgggcatctgcctgtgcccagtgctgactcatttctcctgtgggtgcccaggctggtagctgagtttgacttccggacctttgaccccgagggcatcctcctctttgccggaggccaccaggacagcacctggatcgtgctggccctgagagccggccggctggagctgcagctgcgctacaacggtgtcggccgtgtcaccagcagcggcccggtcatcaaccatggcatgtggcagacagtgagtgtgcggcagccaccccttccaggcctcacggggttctccctgagccagactcagctgtcactcgcttatgcaaccgttaggagatgagctctggggcctgcatctgctgcgtgccggcaggacggggacccctgccccgtttagttcatgctccgggagacggggacccctgccccgtttagttcatgctccgggggacggggacccctgccccgtttagttcatgctccgggggacggggacccctgccccgtttagttcatgctccgggggacggggacccctgccccgtttagttcatgctccgggggacggggacccctgccccgtttagttcatgctccgggggacggggacccctgccccgtttagttcatgctccgggggacggggacccctgccccgtttagttcatgctccgggggacggggacccctgccccgtttagttcatgctccgggggacggggacccctgccccgtttagttcatgctccgggggacggggacccctgccccgtttagttcatgctccgggggacggggacccctgccccgtttagttcatgctctgggggctcactgtggtgctctaggcctctctgctatttcatcacgtttcagcctggctccctcagaaaggggccttgagtgcaacctgtcagtttggtctccctgagtttggtcaccctggctcaggtagaacccgtggttctcagccccaggggaccctgggctgtgtctggaggccatgctgtttatcccgagcagagtggggaacagaagccagggctgcttgacgctacacgcagggtgccccaccaggggaggaggccgccactgaacccgcaccacagcccagagctcccgccgtacgtgtctcccgggccgtggccaggccaggcgccgcccgcccacccttccctgtaggacggcgtggacgctgcggtccctgagccctggctcccagggcctgctggtcagtgcggccatgcatgccaagggtccaggtgacctcacgggagctgccccttgccagagacgtcctgaccacctggaccccagccccatgggcaacctgaggggtcctggtcagacctgcacttgggcagctgtgggcagcggtaaaacgtgcccaccccacatccccatccgtggagcgagagggcctgtaagcaaccaggctcccgcccacagcgctgggcctccctcaccatactgggcttgcagaaggaaacgttgggaagaaaggtggaaagcacgtcttgcccttcagaaacattgtagacttgtatttccatcctgcaaagcaatgcctcgctccatttttcccaacctcttaaaggagcagtatctccaagagcaggaggctgttctcagcaaagctacagaaagcaaaggaagcagaagcagtttcagggatggagccccggggaggagggccccagggcaggtggcctgaggcgaggtcgcctgggggagcggtgttgcaggggatggagccatggggaggaggggcccggggcaggtggcctgaggcgaggtcgcctggagggagtggtgttgcaggggatggagccatggggaggaggggcccggggcaggtggcctgaggcgaggtcgcctgggggagcggtgttgcaggggatggagccatggggaggaggggcccggggcaggtggcctgaggcgaggtcacctgggggagcggtgttgcaggggatggagccacggggaggaggggcccggggcaggtggcctgaggcgaggtcacctgggggagtggtgttgcaggggatggagccacggggaggaggggcccggggcaggtggcctgaggcgaggtcgcctgggggagcggtgttgcaggggatggagccacggggaggaggggcccagggcaggtggcctgaggcgaggtcacctgggggagcggtgttgcagtgtagtcccgcccagtgactcacagcggccgcagcaccccaccaagacaggcccttccccagcaggggtacctcatgaggacccctccccaattccaccctctctagctgctgcccaaacccagctgacccgaatttgtaccatgtttttgtgactcagttcaaacccaaatacctgaaaggtgttttcacacaggaagaaggatattcttctgaagctcaggaatatagtgtatctagcattagactttacaggttttctatgaggaaaggttttggtgaccacattgatgcatcgagggccctcctggcccagatgatgagcagggactctctgaggttgggaccctcttggctcaggtgtggatcaggtggtctccttgaggtcaggtccctcttggctcaggtgaggatcaggtggtctccctgagattgggaccttcttggctcaggtgtggatcagggggtctccctgagattgggaccctcttggctcaggtgaggatcaggtggtctccccgaggtcaggtccctcttggcccaggtgaggatcaggtggcctccctgagattgggaccctcttggcccaggtgaggatcaggtggactccctgaggtcaggtccctcttggcccaggtgaggatcaggtggactccctgaggtcaggtccctcttggcccaggtgaggatcagatggtctccttgagatcaggtccctcatggctcaggtgaggatcaggtggtctctctgaggttgggaccctcttggctcaggtgtggatcaggtggtctctctgaagttgggaccctcttggcccaggtgaggatcaggtggtctccccgggtcaggtccctcttggcccaggtgaggatcatgtggtctccctgagattgagaccctcttggcccaggtgaggatcaggtggtgtccctgagattgggaccttcttggctcaggtgtggatcaggtggtctccctgaggtcaggtccctcttggccaggtgaggatcaggtggtctccctgagattgggaccctcttcgcccaggtgaggatcaggtggcctccctgagattgggaccctcttggcccaggtgaggatcatgtggtctgcctgagattgagaccctcttggcccaggtgaggatcaggtggtctccctgagatcgggaccctcttggctcaggggaggatcaggtggtctccctgaggtcgggaccctcttggcccaggtgaggatcaggtggcctccctgagatcgggaccctcttggcccaggtgaggatcatgtggtctgcctgagattgagaccctcttggcccaggtgaggatcaggtggtctccctgagatcgggaccctcttggctcaggggaggatcaggtggtctccctgaggtcgggaccctcttggctcaggggaggatcaggtggtctccctgagatcgggaccctcttggctcaggggaggatcaggtggtctccctgaggttgggaccctcttggcccaggtgaggatcaggtggcctccccgaggtcgggaccctcttggctcaggagaggatgagtgtggtttttctcagttgggagccccttcagaacgtgcactcccatcttttctcatggcgctgcctctcttcagatctctgttgaggagctggcgcggaatctggtcatcaaggtcaacagggatgctgtcatgaaaatcgcggtggccggggacttgttccaaccggagcgaggactgtatcatctgaacctgaccgtgggaggtattcccttccatgagaaggacctcgtgcagcctgtgagtactgtacctgtccctgtgtagacgcgccgtgtgctgggatcccgggaacggtgtcaggaagcctcagtcacaccctgccctgtgtttaccattaaccaggtgtgaggaggacctagaggaaggaaaggtttcctagagtttgacaaagtcgccgtacagctatgtcattaattttaccatctctttttatgagacctaagttttcatctgaattgataataaagttgtctatttttcaatggagataagacacaattaaattattattattttttttgagacggagtcttgctctgttgcccaggctggagtgcagtggcgcgatctcggctcactgcaagctccgcctcccgggttcacgccattctcctgcctcagcctcccaggcagctgggactacaggcgcccgccaccacgtccggctaatttttttgtatttttagtagagacggggtttcgccgtggtctcgatcttctgacctcgtgaactgcccacctcggcctcccaaagtgctgggattacaggcgtgagccaccgcgcccggccgaaattattctttaacagaacagtaaacttttttggacaatttccaagaacattttgggttttgtaactctgccgtgagtctcataaggggaaaacagccatgatgggcggtcagtgtgggccattgctccaggtcccgccttctctccccttcagcacagcacacgcccgtgcccccgacctgtgtctccagcccccacgtgctgacgtctaagccgtcatcctgggtattttcacttccacaccaggcaggagaaaggcacgcatgtcttcgcgtctttgggtgctgagtgtcggcagtgcctgtgctgaagccaccccttcagtgttgtgaggggcacctgctccccaggcccacagactgcctggtgccgggaccttcggtgttgtgaggggcacctgcttcccaggcccacagacagcctggtgccgggactttgcctggctggaccctcctcgtttcacagataagggggttgccctgatttgcccacagccatattgaatattgaataattcacatgagtgttggatggttgaacaatccatactctttgaccttagacccacatggccttttcagtcctttcctagctttaaaatgaacctttagttcttgagcatacaccagtggaaataggtattctgcagtgaggcgttgtgtaaagtgaagaaaccttctgtgaaatggccaccaccgatgggactggcccgtttctgccgtagagctgcacataccagggccgcgaaggcgccacccaccgactggggcatccggcatggggcttctcgctcccaggaagccacggagatttctctgcctttccagataaaccctcgtctggatggctgcatgaggagctggaactggctgaacggagaagacaccaccatccaggaaacggtgaaagtgaacacgaggatgcagtgcttctcggtgacggagagaggctctttctaccccgggagcggcttcgccttctacagcctggactacagtaagtcttggctcttaccgttggggtggctgtggctgcaccttcagacaggcatacgctgaaagcaagcagacggcctcagatggcagcgtcaggacaagctgaggctcctccggttccggggcagggatgggtgggcggggtgggcggaggtgcgggcagaggcccacctctcaggatggccatgcaggtcactcagttcagagtcagccagtgaagaagaaatgagagagatgtgccgagaaggtgcctgcgaagccagtgccaggaggccggggagagaaggtgcctgcgaggccggcgccaggaggcgggggagagaaggtgcctgcgaggccggcgccaggaggccggggagagaaggtgcctgcgaggccggcgccgggaggccggggagagaaggtgcctgcgaggccagcgccgggaggccggggagagaaggtgcctgcgaggccggcgccgggaggccggggagagaaggtgcctgcgaggccggcgccgggaggccggggagagaaggtgcctgcgaggccggcgccgggaggctggggagagaaggtgcctgcgaggccagcgccgggaggccggggagagaaggtgcctgcgaggccggggaggctgggagccttacagggtcctttgcagaaagtccggagacagcacagccttaggactcgtccaggggcacagagaagctctcggtaacatggtggacaccgtggtcaccgatgacccggtgagacagctacaatgggaggtgtgtaaaaacagccgtgaagctgcctgggggacagtgaacctaggcctgaaaaagggaggacagggtggatgtgagctgctggcccagtcctgtgacgccacgctgccgccctccccagtgcaggctccgggggtgctgctgtgaggatagtgttactgctcggccccaccctgcctcacattcccaccccacgtgggccccactggggcaccacagccctgccctattcctggacaccgagccgtttatggtgaagcccccacacgcacagagggcaggcagcgccccctccgtcagatctcagggctgccggccctcaagcacccagcaggaaccccaggttcaaggggatccacgcggagcaaaggggagggtcctgccccgtcctgagccagatccagtgtcaccgtctccccccgggtgtcaaaagcgtgaccgtgtcaggaaaggcatctgagaaaagcgccatctgccactggctggactgactgtgcacacgcgttctccctcagtcttgatttttggacttccaaatctagagcatcataatgtttgacacgaaatcatgtcatatgaaatgcttaaatcctttttccacttaatatcatacacatttctcaggggtaaccttatgcaggcatcacaggggccatttccagtgactgccggccgcgtctgccggccctttttggtctatccggacagaagcagttacagctccatgcatttccagtgaatctcaaactataccagtaacgtctcttacaagacagaggagacttgctgggaatggtagtactggcctggctcactctgcagcgactctgctgggctcaggcttgcagatctccgggtctgtgcagcctccatgcaaggggccacgtggagccgggaaaccttcccggggagagcagaggccggtgcccttgtgaagccccgatggccaacatgtgcctagcctcctgtcaggagcttccttttttttttttttttttttttttgagacggagtttcgcctttgttgcccacactggagtacaatggcacgatcttggctccacctcccaggttcataccacaacctccgcctcccaggttcaagcgattctcctgcctcagcctcccgagtagatgggattacaggcatgcaccaccacacccagctaattttgcatttttagtagagatggggtttctccatgttggtcaggttggtctcgaactcccgaccttaggtgatccacccacctcagcctcccaaattgctaggattacaggcgtgagccaccacgcccgactgggagcttccattttaaagaacaccatcatctctcccttcacaggttatgggaagaccggcaaacaggagactttttgttgttactttttgattctgttgcaatatttttgttactttttctgattttgtgtgtttcggtgccataaatggttgttgagaactgatgtggcgggtaccagctagggacaggcaggacaggcgatgtgggtttcaggcgtacacagccccgtgggaaagagacagggaaaccagcacaattcactctgaccccaaccttggcctgcagtgcgaggcgcccagtcacaaatgtgtacacacagtgatttggggtcctttttcctaaaacagcttctttatcaggactttggaattctgggtgagatagaaacactgaaaacagggcggaagttttttcttctggcttcttagtccacggagggctcagcgtggagaggatatgccgtggcattctccctgggagaccacacatgttcccgacagctcagaccccagaccgcatgtgctcctgacagctcagaccccagaccgcgcgtgctcctgacagctcagaccccagaccgcaggtgctcccgacagctcagaccccagaccgcgggtgctcctgacagctcagaccccagaccgcgcgtgctcccgacagctcagaccccagaccgcgggtgctcctgacagctcagaccccagaccgcgcgtgctcccgacagctcagaccccagaccgcgggtgctcctgacagctcagaccccagaccacgcgtgctcccgacagctcagaccccagaccacggtgctcctgacagctcagaactcagaccgcgggtgctcctgacagctcagaccccagaccgcgcgtgctcctgacagctcagaccccagaccaccgtgctcatgacagctcctgtccgcatgctatcttaaactctcagcccccactgggccctgtgctgctacctgaaagctgcaggtgagatgcgaggcacgaggccacgcacgctctgaggaaggagctgtcaggcgctcctgaaacaagaggacatcggagggaggcagggacaggcctgcgtcccatggtgcacagcctgtggcccctcagacgggcctgtgtggcctggtggtcacctacagggcatttggaagtggggtactggtgtggccagggagaaacagcctgggggtccccggtgcctctgggctccgggccaagatctgaaccagtctgttgagttttccatcacgtcccagatccggggctgtctgcacagcttcccaccccggctgggactgcatctctcgaggccctgctccgacctcactgtggcctctccaccgtgcataccaccctataatgcaccgctttcattgcagtgcggacccctctggacgtcgggactgaatcaacctgggaagtagaagtcgtggctcacatccgcccagccgcagacacaggcgtgctgtttgcgctctgggcccccgacctccgtgccgtgcctctctctgtggcactggtagactatcactccacgaagaaactcaagaagcaggtagggcctccgccacccagggcgtcctgaccggctcgacccacgggtacgtgggctgcactccctggcaggggacgaagggggcccgcggtgggatccccagggacccccaaagcctctgaccagaggtctgatgagccaagcccggcgtgggccacgcttcgggctgcgggggttgtttggacaccaggtcaccgccacacagctgagggggccggcgcctgcgagccacactcggctcacagtgtgggagcttttcccctgttcggttgggcagatggtggctcacagcaatctgaattagtctctggtgtttaagtcagatgatttcagcaacaaactcagttttccaatttccctggaaaagtcggatctgtgaccttggccggtcccccaacagcgtctttccgtgggggacaccgggtggagctgagtgcagctgccccttggacaaggtccccccacccccggtcctcacaataagtcagctgtcctgggctgggggactcatgctgttttccccacagaacaatcaagaggtgacagaaacagcttttattctctcgctcgtgtgctaaggagggagacatgggtcaaaccagagaggctcacgttctccaagtctgcccaccccggggccacagagccctcccgcttgctgggatacgacagacaggcttggttcatgcaaatgctcgttaccagggccagacccaatctcagcatctggaataaacagctgctgttatgtagcaacagccgacccctgggctgctgggctgtggtgccagcgtgagtgcccaccgggctgggaggccgccaccgcagggctgggtcctgggtccccatcagggccaccccagttcctggtcaagtgcagcctcggtcttgtgtgtgcctggtgcctggggctggggttgaccctctcacacccaacctgggggccacacttgttcccccacagcctcccaggctggcccctggctttacgtgcagagaagctgagccccaggtggggtgggggtgtcatccacagtcagcgagcatccagacccagggctgcagggaaccctggacggagacaggcgtgcggcgtaggggtggccagcagctgtgaggaccagcttggacctaacagctcacgtaggggtggccggcaggccctgaccacacctcggtctcctgcagctggtggtcctggccgtggagcatacggccttggccctaatggagatcaaggtctgcgacggccaagagcacgtggtcaccgtctcgctgagggacggtgaggccaccctggaggtggacggcaccaggggccagagcgaggtgagcgccgcgcagctgcaggagaggctggccgtgctcgagaggcacctgcggagccccgtgctcacctttgctggcggcctgccaggtaggtgctccctgctccgctcaacccgggtgaagagctccagggaggcccagcttggtcaccccagatctaacctggacaggctggggtttctggtagtgaatgcggaagaggacttgtgttttaagaggaaggagaagtccaggtgggtcgttagtggctattatggtgtctcggtgctggtcaggtcattggctgagactgagaaacacgtacgggggccggcattggcctgagtcaggccccacgaacctgcatcttcagggagcattcgtccacacccatcagaccagccccgggggagagggctgggcagacctcgggccaggctgcagttgggacccgcggctgtcaccgcagctgttagcagcgaacagagtgaccgccagcccctcccatgtccagcagggcgtcctgccgtgtcccatgggctacacagcacagaggctgggaccggggatgtccttgccatgagctgggagggtcagcggaaaggcacgtgggagccggcaagtcctcggctgcccgcaggttttcacttgcggcaaacggcaggatttctctcttggctgccagacacagactccacttagttttaataaacagagctttgaagaggatgagagcgagccaggaggcctgcagcctgaatgactcactgggcacagaagaagatcacgtttaaccgatgggactgtctgtgctcccagcggggaagggagggctggcgtctgcagagcccaggctggcagatgcctcctgcttgtctgccgggtctgcggccaaacgaacggggaccgagaagttagagaagaaagggaaaccctgccctttcggagggaacccggggctggccacaagcgctgccgggggtgggggggccaggcggggccggccacgtggtgagctaagatatgttgttctctccctgcggcccagatgtgccggtgacttcagcgccagtcaccgcgttctaccgcggctgcatgacactggaggtcaaccggaggctgctggacctggacgaggcggcgtacaagcacagcgacatcacggcccactcctgcccccccgtggagcccgccgcagcctaggcccccacgggacgcggcaggcttctcagtctctgtccgagacagccgggaggagcctgggggctcctcaccacgtggggccatgctgagagctgggctttcctctgtgaccatcccggcctgtaacatatctgtaaatagtgagatggacttggggcctctgacgccgcgcactcagccgtgggcccgggcgcggggaggccggcgcagcgcagagcgggctcgaagaaaataattctctattatttttattaccaagcgcttctttctgactctaaaatatggaaaataaaatatttacagaaagctttgtaacaccgcgtggccgtcatctgctccccgcggggttctgcacacgtagcagcgtttgggatgagcggggctgccagggctccaggccgcaccctcagccgctccaaagatccctccctcttttctgctcccagcctggttgggcagccacggtctgctccccaggagcctctgactcctctggtagtggcggcaggggctggagcctcagtttacttgttctgtaaatgcggagaacgccctgctcggcccccaccacaggcagccagtcattgctgagtgaggagggcttggcacacaaatgcaggctgctggggcagcggcctctgagccaacctgggagggaccccgagctgggaccgagggccggaagacaccgaggcagcgcctgcacccctgtgccattcccgtccccaccctcctgcacagatccacttgcttccgggcctcaagtgtgttctgttgagaaagggaaactgctttctctgtgtcggtctggggtagagcttgccaggagcaaagccagccctgcttcccgcgtccccactggcagggtccccatgtccctcagcctcagcttccttgtctgcaaggggtggagcggtcactggtgctctctgaccccagcaggccacaagtctgcagggaaggtcagggcagccggaacgcggccaggcaggtgcctgaaatgcagtcgggaccctgcctgcctcctggaaggatgtcggagccgcagctggtgggggccacggagtcactgcttctccttggtcccaaggggacgaccaagactcatggcttgacgctcccgtgggacgcggccacctgtgctcgagcctctgggccaaacatgggtccccagggtggatgcggtcactgcaggggccacacgggggatcagggagggtttcagctctgaggcccaaaccaggattccactttaagaccaaacccccacccgtgctcggagctccctgggcaggagtgagacggggcagctcggagcagccccacctcccaccagtcagtcccagagctgcgcccaccgggcaggacaggctgtgcgtcggggcatctttgcctctgcctggctggggtcagcacttgacctagagaaaagtcgggtggagaagaaggatagaatccatgagaacccatccagggataaatcgccacaaatgaactgcaaagaggtttctagaaagaggcctgtggctttgaaggccacaggggaggccccgctggctggactgacaaggtggcatcggccgagtgggctcctgaggggcagcctcgggccgggaaggagcggcttccctctggcccccggcctgacggctgtggaatgggcagagcttctccaaggctcgggagccagcaacactcatgcccacctggagggaccctgcccgcctgggccgagctcaccccacggatggacggccagccaggcaccttgccaggggccatgcacagggggccccatcccctgccgtccagagccgcccagctcgtctacgctggagcctccaggccctggtggtccctgagggtccctggcaggcccac

SEQ ID NO: 28221 - DNA, 5254 bp, Homo Sapiens
tgcagaagtattcttttcaattatattgttagtggacttgttttaattttagagaaactttgagtacagatactgtgagcttacattgaaaacagatattacagcttatttttttctacataattgtgaccaatacatttgtattttgtgatgaatctacatttgtttgtattcatgttcatgtgattaactcttagaagtgttgtaaaagatgcagagtaagtattatgccccagttcagaaatttggcattgatcttaaactggaacatgcttttactttattgccctaacaattttttattaaatttatttgaaaatgcatcacatgatgaaaaattatagtagcttataagagggcatatacagtgaagagtaagttttccctcctactctcgatcttccagaagctgtacttttaccagtttctttgtcccaccaacttaaaaaaaaaaagtacaattcattgttttgcaaaagtgtatggtaggggcttaaaagaaactataaagttttatttgaatgaacactatgcactgctgtaactggtagtgttcagtaaaagcaaaatgatagttttctagatgacataaaatttacatttaatacagataagtgttcttcagtgtaatgtgacttcatgctatatatcttttgtaagacatttccttttttaaaaaaatttttgcaaataactgatctcaagtatatgtcatttactcaaaatctgtcataagcattactttatagctagtgacagtgcatgcacagccttgttcaactatgtttgctgcttttggacaatgttgcaagaactctatttttgacatgcattaatcttttattttgcacttttatgggtgacagtttttagcataacctttgataaaatacactcaagtgacttggacttagatgcttatccttacgtccttggtaccttttttgtattaacaaacactgcaatttatagattacatttgtaggaagttatgcttttttctggtttttgttttactttcaacctaggttataagactgttattctatagctccaacttaaggtgcctttttaattccctacagttttatgggtgttatcagtgctggagaatcatgtagttaatcccattgctcttacaagtgtcagcttacttgtatcagcctccctacgcaaggacctatgcactggagccgtaggaggctcttcagttgggccccaaggataaggctactgatttgatactaaatgaatcagcagtggatgtagggatagctgattttaaaacactcggctgggcacagtggctcacacctgtaatcccagcactttgggaggctgaggcaggcagatcatgatgtcaggagtttgagaccagcctggccaatatggtgaaaccctgtctctacaaaaaatacaaaaattagctgggcatggtggtgcgtgcctgaagtcccagctactcgggaagctgaggcagaagaatcacttgaacctgggaggcggaggttgtggtgagccgagatcgcaccactgcactccagcctgggcgacagagcgagactctgcctcaaaaaacaaaacaaaacaaaacactcacccatcaacgaatatagactcttctctcatttatcgatgatcctctttttccattttttaagtacttatgtggaagctagtctcccaaaacacaatctttagagagaaaagacatgaacgaactccaaaatatccatttaatcaatcatgtttttggctttggataaagaactttgaaccagtttttttctcaggagctgtcaaatggacacttaattatgacatgagaatgaagaaattattttggaaaaaaaaaatgacctaatttacctatcagtgaaagctttattttctggtgccttttgaaagtatatggagtcatatcattcttctgtttaaaatgttagtttggtttgactttccactttgtcctttctgctcttgtgaagaaaaaaaaaagcattttcgaggaaagaattatgcaatttcttttgttttctgtgtcattatttattgctttttcaatgtgcagccagtggatggttttagttctttcagatgaactgccatttgtgtttcagctcacagttctttgctgggtaaaagaaatactttctgacagtcacctgagccttaaatgtaagtattacatgacatgcattctgtttcttccagagttctgtctgccacacgaaagagaatatttgcttacttgatagaactttggcattttcatcattcttttacttaaccaggcttatggcatgatctctggaacaaatttgtaggaaaaaattactccaattgaatgactgatgtatgtaatcaacttcattgggctgcagtaaactagtggaaattagagagttgttttattggtgttttctactgtgagttaattaaaaattgtttttatttggggtcattatgtcacagtcttgagttaacaagatcttacgtgattggccttttctttgttttctcttaggagttgtgtctcatgaatgacagtactaaagctattaacaactaagagtttgacagagaactataagcctgttgtatctcctaaaagttgtcaactccccacccttggactttaaatgaaaattttattcagtccagctattcttacagtccctaaggattttcatatatctatgtataggagataaaatttgctagtaagatttttaaaaactggctagtgaaaggaaagtacctctgaaagaaaccattttagcaaattatggttatatgttttaatttaatctacagaatgttttatagtaaaattctagcaccactagaataatcacatagcatgtacaatatatttatgctggctgaaaagacagaatctgggaataataaaattgcaaccagtttggtaatgcaaacagcagaatagaatgaaatctcagtaatgaattaaagcaacaaaaagatattgattggcaaaaagcaagatataagagattcatttgcttaacatttctacataatatttatggtctggtcagtattggtctggtcagtattgcctggctgacgtgaaatgtaaactagtaggcgtgttattgatctgctaaaactaaccctctttttaagaggagatttaaggaagacgtcaatcaaaatgtcaaatatgtgtgtcagaatataaataatttttcacattgtattgttgctatataaaaaaaataatagaattggttgggtttctgaggtgaaatccagagtaagagtactagacagttcaacaagccacatctaatggcacagatagaggatgtagctattttatacctttcataacatttgagagtaagatatccttcaggatgtgaagtgattattaagtactcatacctgaaatctgttgtcaagattagaactggggttcatgttaaaaaccttccatattacctgagggtacctgtggggaacagttccttcccctgtgtggtagtattttgttggaagagaatgtttatacaaaaaatgaaattcttccaacagcagagaaactctaaaaagtttgatagtacctatcaaagtgctgtacttctgtgatagagaacatctgatgtaccaatttagatctatttctttatactttttctaatcaattgcttaatagtactttggatgattatcacctttgccacttaaaatatataaatatcctttttacttcatgaggaaggaagaattttttgataattactgagttcagccttttgtgatgacttatattttggacttacattttaactttaaagaatgtcagatcccttctttgtcttactagttaaatcctcacctaatctcttgggtatgaatataaatgtgtgtcatcgttatattgttcagctagatgagcaagtatcttagggtagtaggtagcctggtggttttagaagtgtttggtgatttttatggagagagttttcctaagtggtggtttataggtggtatcagatattattagggcagctttttggggagtaatctcaggtctcccagagcagcagcatttttctcattgatataagtaagattcttaggagcttttcttatcacacaagatgcctgaatcgaatgtgagaattgaaggcatttcttctgcataaacaaagaattctacctgctggacagaaacctggaaagttctttggaattcgctgaattacagtttagtatgtcctgattacagagtgacaatatttatcaagcctttgttatattggattatcttctctcttaaaatacaactgtattataattgaaatgacagcccaaaattggatggtttaccaaaaccaatgaaagggatttcacacatcaatttttatttctgttttgaagagcacatgctatataataattgctagtagcaactgcagtaaaacaggtgataagttattttctctgaaaagatccagtcctagagcaggattcttcgatcattcatggcagagtgaaaaaggtttgtatggttcttgtccaaataactcagttcttaaaattcttaaaatgatcgtaaaccattatcctttaaaggtttatttgaagatgctgttaaagtacagaattttgtgtacaggtagatttttccgtccctcattaatagtgccttcttaattaatacagactggtgttagctataacaaaactccagtaaggccaaagaatcccaagttctttgtggaaaaaaaaaaaaaatcttttagggtcagattttcccttctaatatcattgaagatgatgttgcattgatttattcataaagtattttaactataggaactctagaagataatggttaggcaagtgattttttttttaaatatggttggcgtaagttgtattttgaaattcacttattttaaaatcgaagaggattgtaatcatggaaatagaatgtttgtatctacctgcccacattttcttaaaaagatatttcatatacagataatgaagaccaagctagtggctgcactgtaggtctgctgcttatttgtatttgttgtgcttctgtttatgttgtagaagctgaaattctagcaacatgcttcaattctgttattttgatacttatgaaaatgtattaggttttactatattgtgcttttgaaagccataactcttaagaactttgtttttgcatattgtttgctaattctttactttaataaacctcaaaacctgc

SEQ ID NO: 28222 - DNA, 8110 bp, Homo Sapiens
gatcagagtgggccactgccagccaacggcccccggggctcaggcggggagcagctctgtggtgtgggattgaggcgttttccaagagtgggttttcacgtttctaagatttcccaagcagacagcccgtgctgctccgatttctcgaacaaaaaagcaaaacgtgtggctgtcttgggagcaagtcgcaggactgcaagcagttgggggagaaagtccgccattttgccacttctcaaccgtccctgcaaggctggggctcagttgcgtaatggaaagtaaagccctgaactatcacactttaatcttccttcaaaaggtggtaaactatacctactgtccctcaagagaacacaagaagtgctttaagaggcggcggaaggtgatcgaattccggtgatgcgagttgttctccgtctataaatacgcctcgcccgagctgtgcggtaggcattgaggcagccagcgcaggggcttctgctgagggggcaggcggagcttgaggaaaccgcagataagtttttttctctttgaaagatagagattaatacaactacttaaaaaatatagtcaataggttactaagatattgcttagcgttaagtttttaacgtaattttaatagcttaagattttaagagaaaatatgaagacttagaagagtagcatgaggaaggaaaagataaaaggtttctaaaacatgacggaggttgagatgaagcttcttcatggagtaaaaaatgtatttaaaagaaaattgagagaaaggactacagagccccgaattaataccaatagaagggcaatgcttttagattaaaatgaaggtgacttaaacagcttaaagtttagtttaaaagttgtaggtgattaaaataatttgaaggcgatcttttaaaaagagattaaaccgaaggtgattaaaagaccttgaaatccatgacgcagggagaattgcgtcatttaaagcctagttaacgcatttactaaacgcagacgaaaatggaaagattaattgggagtggtaggatgaaacaatttggagaagatagaagtttgaagtggaaaactggaagacagaagtacgggaaggcgaagaaaagaatagagaagatagggaaattagaagataaaaacatacttttagaagaaaaaagataaatttaaacctgaaaagtaggaagcagaagagaaaagacaagctaggaaacaaaaagctaagggcaaaatgtacaaacttagaagaaaattggaagatagaaacaagatagaaaatgaaaatattgtcaagagtttcagatagaaaatgaaaaacaagctaagacaagtattggagaagtatagaagatagaaaaatataaagccaaaaattggataaaatagcactgaaaaaatgaggaaattattggtaaccaatttattttaaaagcccatcaatttaatttctggtggtgcagaagttagaaggtaaagcttgagaagatgagggtgtttacgtagaccagaaccaatttagaagaatacttgaagctagaaggggaagttggttaaaaatcacatcaaaaagctactaaaaggactggtgtaatttaaaaaaaactaaggcagaaggcttttggaagagttagaagaatttggaaggccttaaatatagtagcttagtttgaaaaatgtgaaggactttcgtaacggaagtaattcaagatcaagagtaattaccaacttaatgtttttgcattggactttgagttaagattattttttaaatcctgaggactagcattaattgacagctgacccaggtgctacacagaagtggattcagtgaatctaggaagacagcagcagacaggattccaggaaccagtgtttgatgaagctaggactgaggagcaagcgagcaagcagcagttcgtggtgaagataggaaaagagtccaggagccagtgcgatttggtgaaggaagctaggaagaaggaaggagcgctaacgatttggtggtgaagctaggaaaaaggattccaggaaggagcgagtgcaatttggtgatgaaggtagcaggcggcttggcttggcaaccacacggaggaggcgagcaggcgttgtgcgtagaggatcctagaccagcatgccagtgtgccaaggccacagggaaagcgagtggttggtaaaaatccgtgaggtcggcaatatgttgtttttctggaacttacttatggtaaccttttatttattttctaatataatgggggagtttcgtactgaggtgtaaagggatttatatggggacgtaggccgatttccgggtgttgtaggtttctctttttcaggcttatactcatgaatcttgtctgaagcttttgagggcagactgccaagtcctggagaaatagtagatggcaagtttgtgggttttttttttttacacgaatttgaggaaaaccaaatgaatttgatagccaaattgagacaatttcagcaaatctgtaagcagtttgtatgtttagttggggtaatgaagtatttcagttttgtgaatagatgacctgtttttacttcctcaccctgaattcgttttgtaaatgtagagtttggatgtgtaactgaggcgggggggagttttcagtatttttttttgtgggggtgggggcaaaatatgttttcagttctttttcccttaggtctgtctagaatcctaaaggcaaatgactcaaggtgtaacagaaaacaagaaaatccaatatcaggataatcagaccaccacaggtttacagtttatagaaactagagcagttctcacgttgaggtctgtggaagagatgtccattggagaaatggctggtagttactcttttttccccccacccccttaatcagactttaaaagtgcttaaccccttaaacttgttattttttacttgaagcattttgggatggtcttaacagggaagagagagggtgggggagaaaatgtttttttctaagattttccacagatgctatagtactattgacaaactgggttagagaaggagtgtaccgctgtgctgttggcacgaacaccttcagggactggagctgcttttatccttggaagagtattcccagttgaagctgaaaagtacagcacagtgcagctttggttcatattcagtcatctcaggagaacttcagaagagcttgagtaggccaaatgttgaagttaagttttccaataatgtgacttcttaaaagttttattaaaggggaggggcaaatattggcaattagttggcagtggcgtgttacggtgggattggtggggtgggtttaggtaattgtttagtttatgattgcagataaactcatgccagagaacttaaagtcttagaatggaaaaagtaaagaaatatcaacttccaagttggcaagtaactcccaatgatttagtttttttccccccagtttgaattgggaagctgggggaagttaaatatgagccactgggtgtaccagtgcattaatttgggcaaggaaagtgtcataatttgatactgtatctgttttccttcaaagtatagagcttttggggaaggaaagtattgaactgggggttggtctggcctactgggctgacattaactacaattatgggaaatgcaaaagttgtttggatatggtagtgtgtggttctcttttggaatttttttcaggtgatttaataataatttaaaactactatagaaactgcagagcaaaggaagtggcttaatgatcctgaagggatttcttctgatggtagcttttgtattatcaaacttttttcagataacatcttctgagtcataaccagcctggcagtatgatggcctagatgcagagaaaacagctccttggtgaattgataagtaaaggcagaaaagattatatgtcatacctccattggggaataagcataaccctgagattcttactactgatgagaacattatctgcatatgccaaaaaattttaagcaaatgaaagctaccaatttaaagttacggaatctaccattttaaagttaattgcttgtcaagctataaccacaaaaataatgaattgatgagaaatacaatgaagaggcaatgtccatctcaaaatactgcttttacaaaagcagaataaaagcgaaaagaaatgaaaatgttacactacattaatcctggaataaaagaagccgaaataaatgagagatgagttgggatcaagtggattgaggaggctgtgctgtgtgccaatgtttcgtttgcctcagacaggtatctcttcgttatcagaagagttgcttcatttcatctgggagcagaaaacagcaggcagctgttaacagataagtttaacttgcatctgcagtattgcatgttagggataagtgcttatttttaagagctgtggagttcttaaatatcaaccatggcactttctcctgaccccttccctaggggatttcaggattgagaaatttttccatcgagcctttttaaaattgtaggacttgttcctgtgggcttcagtgatgggatagtacacttcactcagaggcatttgcatctttaaataatttcttaaaagcctctaaagtgatcagtgccttgatgccaactaaggaaatttgtttagcattgaatctctgaaggctctatgaaaggaatagcatgatgtgctgttagaatcagatgttactgctaaaatttacatgttgtgatgtaaattgtgtagaaaaccattaaatcattcaaaataataaactatttttattagagaatgtatacttttagaaagctgtctccttatttaaataaaatagtgtttgtctgtagttcagtgttggggcaatcttgggggggattcttctctaatctttcagaaactttgtctgcgaacactctttaatggaccagatcaggatttgagcggaagaacgaatgtaactttaaggcaggaaagacaaattttattcttcataaagtgatgagcatataataattccaggcacatggcaatagaggccctctaaataaggaataaataacctcttagacaggtgggagattatgatcagagtaaaaggtaattacacattttatttccagaaagtcaggggtctataaattgacagtgattagagtaatactttttcacatttccaaagtttgcatgttaactttaaatgcttacaatcttagagtggtaggcaatgttttacactattgaccttatatagggaagggagggggtgcctgtggggttttaaagaattttcctttgcagaggcatttcatccttcatgaagccattcaggattttgaattgcatatgagtgcttggctcttccttctgttctagtgagtgtatgagaccttgcagtgagtttatcagcatactcaaaatttttttcctggaatttggagggatgggaggagggggtggggcttacttgttgtagctttttttttttttacagacttcacagagaatgcagttgtcttgacttcaggtctgtctgttctgttggcaagtaaatgcagtactgttctgatcccgctgctattagaatgcattgtgaaacgactggagtatgattaaaagttgtgttccccaatgcttggagtagtgattgttgaaggaaaaaatccagctgagtgataaaggctgagtgttgaggaaatttctgcagttttaagcagtcgtatttgtgattgaagctgagtacattttgctggtgtatttttaggtaaaatgctttttgttcatttctggtggtgggaggggactgaagcctttagtcttttccagatgcaaccttaaaatcagtgacaagaaacattccaaacaagcaacagtcttcaagaaattaaactggcaagtggaaatgtttaaacagttcagtgatctttagtgcattgtttatgtgtgggtttctctctcccctcccttggtcttaattcttacatgcaggaacactcagcagacacacgtatgcgaagggccagagaagccagacccagtaagaaaaaatagcctatttactttaaataaaccaaacattccattttaaatgtggggattgggaaccactagttctttcagatggtattcttcagactatagaaggagcttccagttgaattcaccagtggacaaaatgaggaaaacaggtgaacaagctttttctgtatttacatacaaagtcagatcagttatgggacaatagtattgaatagatttcagctttatgctggagtaactggcatgtgagcaaactgtgttggcgtgggggtggaggggtgaggtgggcgctaagcctttttttaagatttttcaggtacccctcactaaaggcaccgaaggcttaaagtaggacaaccatggagccttcctgtggcaggagagacaacaaagcgctattatcctaaggtcaagagaagtgtcagcctcacctgatttttattagtaatgaggacttgcctcaactccctctttctggagtgaagcatccgaaggaatgcttgaagtacccctgggcttctcttaacatttaagcaagctgtttttatagcagctcttaataataaagcccaaatctcaagcggtgcttgaaggggagggaaagggggaaagcgggcaaccacttttccctagcttttccagaagcctgttaaaagcaaggtctccccacaagcaacttctctgccacatcgccaccccgtgccttttgatctagcacagacccttcacccctcacctcgatgcagccagtagcttggatccttgtgggcatgatccataatcggtttcaaggtaacgatggtgtcgaggtctttggtgggttgaactatgttagaaaaggccattaatttgcctgcaaattgttaacagaagggtattaaaaccacagctaagtagctctattataatacttatccagtgactaaaaccaacttaaaccagtaagtggagaaataacatgttcaagaactgtaatgctgggtgggaacatgtaacttgtagactggagaagataggcatttgagtggctgagagggcttttgggtgggaatgcaaaaattctctgctaagactttttcaggtgaacataacagacttggccaagctagcatcttagcggaagctgatctccaatgctcttcagtagggtcatgaaggtttttcttttcctgagaaaacaacacgtattgttttctcaggttttgctttttggcctttttctagcttaaaaaaaaaaaaagcaaaagatgctggtggttggcactcctggtttccaggacggggttcaaatccctgcggtgtctttgctttgactactaatctgtcttcaggactctttctgtatttctccttttctctgcaggtgctagttcttggagttttggggaggtgggaggtaacagcacaatatctttgaactatatacatccttgatgtataatttgtcaggagcttgacttgattgtatattcatatttacacgagaacctaatataactgccttgtctttttcaggtaatagcctgcagctggtgttttgagaagccctactgctgaaaacttaacaattttgtgtaataaaaatggagaagctctaaattgttgtggttcttttggaataaaaaaatcttgattgggaaaaaagatgggtgttctgtgggcttgttctgttaaatctgtggtctataaacacagcacccataattacagcataatcttcaagtagggtacggactttgggggattggtgcgagggtagtgggtgagtggcctactaaaaagcccagtaacccccacaggaaaatagggaacttctttttaagtagcctcctttccactatttagtaattggctgtgagctgggctgggggagaaatggggcggggtgtgtgtgtcattggaaagctctcttttttgtttttttgagacagtctcactttgtcccccaggctggagtgtagtggcatgatctctgcaaactgcaacctccacttgtggggtccaagtggttgtcctgcttcaccctccctgtagctgggactacaggtgcacaccaccacgcctggctaatttttgtatt
